United States Patent Application Publication US 2020/0002727 A1 - sequence listing, part 2

SEQ ID NO: 33 - DNA, 1947607 bp, Cricetulus griseus
  modified_base (9131)..(9185): a, c, t, g, unknown or other
  modified_base (85917)..(85926): a, c, t, g, unknown or other
  modified_base (130258)..(130307): a, c, t, g, unknown or other
  modified_base (161268)..(161322): a, c, t, g, unknown or other
  modified_base (179391)..(179629): a, c, t, g, unknown or other
  modified_base (234242)..(234319): a, c, t, g, unknown or other
  modified_base (240083)..(240304): a, c, t, g, unknown or other
  modified_base (248487)..(248674): a, c, t, g, unknown or other
  modified_base (248916)..(249508): a, c, t, g, unknown or other
  modified_base (249800)..(252970): a, c, t, g, unknown or other
  modified_base (253181)..(254777): a, c, t, g, unknown or other
  modified_base (261192)..(261224): a, c, t, g, unknown or other
  modified_base (271171)..(271450): a, c, t, g, unknown or other
  modified_base (350331)..(351743): a, c, t, g, unknown or other
  modified_base (415672)..(415775): a, c, t, g, unknown or other
  modified_base (416570)..(416643): a, c, t, g, unknown or other
  modified_base (418904)..(419165): a, c, t, g, unknown or other
  modified_base (490061)..(491702): a, c, t, g, unknown or other
  modified_base (491876)..(491971): a, c, t, g, unknown or other
  modified_base (492495)..(494343): a, c, t, g, unknown or other
  modified_base (494762)..(495476): a, c, t, g, unknown or other
  modified_base (495871)..(495972): a, c, t, g, unknown or other
  modified_base (541501)..(541667): a, c, t, g, unknown or other
  modified_base (572683)..(572867): a, c, t, g, unknown or other
  modified_base (659578)..(659773): a, c, t, g, unknown or other
  modified_base (685081)..(685182): a, c, t, g, unknown or other
  modified_base (700304)..(700570): a, c, t, g, unknown or other
  modified_base (765272)..(765398): a, c, t, g, unknown or other
  modified_base (765708)..(765827): a, c, t, g, unknown or other
  modified_base (779244)..(780414): a, c, t, g, unknown or other
  modified_base (845122)..(845545): a, c, t, g, unknown or other
  modified_base (845596)..(845965): a, c, t, g, unknown or other
  modified_base (846448)..(846905): a, c, t, g, unknown or other
  modified_base (857354)..(857888): a, c, t, g, unknown or other
  modified_base (858801)..(859269): a, c, t, g, unknown or other
  modified_base (859718)..(859885): a, c, t, g, unknown or other
  modified_base (862098)..(862386): a, c, t, g, unknown or other
  modified_base (862715)..(862796): a, c, t, g, unknown or other
  modified_base (863036)..(864561): a, c, t, g, unknown or other
  modified_base (866239)..(866369): a, c, t, g, unknown or other
  modified_base (902701)..(903997): a, c, t, g, unknown or other
  modified_base (922144)..(922563): a, c, t, g, unknown or other
  modified_base (941416)..(944119): a, c, t, g, unknown or other
  modified_base (1041513)..(1041688): a, c, t, g, unknown or other
  modified_base (1045833)..(1045842): a, c, t, g, unknown or other
  modified_base (1050701)..(1050711): a, c, t, g, unknown or other
  modified_base (1077729)..(1078115): a, c, t, g, unknown or other
  modified_base (1078582)..(1080364): a, c, t, g, unknown or other
  modified_base (1080556)..(1084088): a, c, t, g, unknown or other
  modified_base (1084827)..(1084945): a, c, t, g, unknown or other
  modified_base (1097720)..(1098028): a, c, t, g, unknown or other
  modified_base (1197367)..(1202559): a, c, t, g, unknown or other
  modified_base (1214087)..(1215732): a, c, t, g, unknown or other
  modified_base (1228684)..(1228693): a, c, t, g, unknown or other
  modified_base (1276187)..(1276346): a, c, t, g, unknown or other
  modified_base (1280263)..(1280632): a, c, t, g, unknown or other
  modified_base (1289545)..(1289589): a, c, t, g, unknown or other
  modified_base (1293820)..(1293908): a, c, t, g, unknown or other
  modified_base (1307008)..(1308419): a, c, t, g, unknown or other
  modified_base (1357503)..(1357852): a, c, t, g, unknown or other
  modified_base (1358256)..(1358351): a, c, t, g, unknown or other
  modified_base (1361968)..(1366005): a, c, t, g, unknown or other
  modified_base (1372210)..(1372404): a, c, t, g, unknown or other
  modified_base (1372746)..(1373278): a, c, t, g, unknown or other
  modified_base (1373864)..(1374217): a, c, t, g, unknown or other
  modified_base (1442158)..(1442268): a, c, t, g, unknown or other
  modified_base (1442716)..(1442725): a, c, t, g, unknown or other
  modified_base (1502335)..(1503771): a, c, t, g, unknown or other
  modified_base (1526460)..(1526881): a, c, t, g, unknown or other
  modified_base (1544592)..(1544884): a, c, t, g, unknown or other
  modified_base (1576491)..(1576586): a, c, t, g, unknown or other
  modified_base (1582073)..(1582325): a, c, t, g, unknown or other
  modified_base (1688500)..(1688644): a, c, t, g, unknown or other
  modified_base (1689703)..(1689841): a, c, t, g, unknown or other
  modified_base (1690915)..(1690935): a, c, t, g, unknown or other
  modified_base (1691371)..(1691590): a, c, t, g, unknown or other
  modified_base (1741208)..(1741217): a, c, t, g, unknown or other
  modified_base (1784568)..(1784585): a, c, t, g, unknown or other
  modified_base (1804117)..(1804126): a, c, t, g, unknown or other
  modified_base (1804433)..(1804483): a, c, t, g, unknown or other
  modified_base (1883118)..(1883150): a, c, t, g, unknown or other
  modified_base (1918208)..(1918469): a, c, t, g, unknown or other
  modified_base (1925852)..(1925883): a, c, t, g, unknown or other
  modified_base (1928475)..(1928518): a, c, t, g, unknown or other
taaaaccctacctatcacatatcctttctgcttcccagggagggtgaggacttacataggggtcatcagagtctatcatatcctttgggatagggcataggtccacccccatgtgtctttgctcagggagtatccctctgtgtggaatgggctcccaaagtccacacctgtgctcgggataaatactgatctattacaggaggccccacagatttccaaggtctcctcattgacacccacattcttggggtctggatcagtcccatgctggtttcccagctatcagtctgggcaccaagagctcccagttgttcatgtcagctgtttctgtgtgattcaccagcctgatctggactcctttgctcatcactctcctcctctgcaactggattccagttcagttcagtgattagttgtgcgggtctgcttctacttccaccagctgctggatgaagattatagggtggcatataagtgagtcatcaatctcattatcacagtagggcatttaaggtagcctctcatctgttgctaagattgttaggacatgtcatctttgtagatctccagacatttgcctagtgcctgatttctctttaaacctaaaatgtctccctctactatggtatgtcctttcttgttttcttctattcttcccccaactcaacctttctgctccctcatgtcctcctcacccctccccttctccccttctcattctcctaactcccttcccccaccctccatgctcccaatttgctcaggagatcatgtccctttccccttctctggaggaccatatatgtctctcttagggtcctccttgtttactaacttctctggcagtgtagattgtaggctggtaatcctttactttatgtctaaaagcaacataggagtgagtacataccatgtttgtcttttttgtgactggattacctctctcagaatggtttctctagttccatccattttcctgtaaatttcaagattccattgttttttttcctgctgagtagtgctccattgtgtaaatgtacaacatttgctctatccattcttccattgagggacatctaggatgattccaagttctggctacttcaaatagtgttgctatgaacatcgttgagtagatgttcttgttatatgcaagtacttcttcctcttcatatcccgagtgtccctctttctgttagtctctctttaccttcatccaacatggagtgcttgtcataatttcatccctttttattgtttaataaaactccattgtgtatatatacagcagtttgtttaactgttcatttgtcattttttggtaaggctctttttaaaaaatatataataaatttaatgctgctaatataaggaaatagaattcatccatatgttaaattagagttggaaatctgtctgtcaaacatttttttgattccgaccttcaggaatggggacgcaaaaacctatgaacagggtaagaggatgaacaagtgaagcagagcctcctagtggttataattggaataacagaaatgtaaaaataaactactgactatgaggacccttgcatctactaggaagcagtttgcagagacacacacaggggaatttggggacatagggataaattcacaacactacctccttcaaggattagcagccagggatcaaatttatctgcagtgtcttttgaggatattctgtctccagtacacagctcactcatatcccatgttcccttgaaatgtgtcgtcttagatttgctttaggtccaacacaatgcacttgaattcaccttacttgacagagttcttgatggttgtttatttttttatttttttgtgaagctaaactaaatttttaactgaaaattaccaaccaaaataacactgatcatcctacagcaaaagataccaagaccaagacattttttattattgtccatattgagataatgatgccaattcccccttatatctgttaatgtagcatattgcaatcataggttttttttttaattggaacatggccctcacttggtcatgaacaacattagattttagatttagcattagtgtttagtatagaactgtcaaagcttcagagttttctaaaacctcatttctattgaaagtaattatatttactccagtacatttttctttatatttttacaatatacattcctatcccctgacttgatgttgatgtaaatgaaaaacacattttgaagtccaatgaatgcaaggttccctgtgatgtgtagcagggcacagtcaatatacagggaccttgaaagtcagaaagtgggtggtaaggctgacagaggttacatgagtttctagaaataccatagcaaaatgccacaaactgagtggtttaaaataacagaaagtcaaggagttaccaggtctaaggtatttctgagactctagataaaatactttttaagatcttctagcatctaatgtttacaacaatccttaaagattttttggaatatagagataaacttccactgcatgattattttttctccaagtatgctcttactgtattctctctatgccccagtcacctcttgtgaaagagactctatatattggattaaagatgcctagatattcttcttatcattttgttcaacctccaaagacattttcccaattactagaatagtaggatcgtatgatatcttctgtggcactgtatgtcccattctggtggttctataatgcccaatcttaagattttgtttcacatcagcaaaaacatgaagtaagggaaacatgttcttagattataccatatatcaaaaatgtttttaaattctactcacttttcagagaaggtctggtacccttgtctctccatcacagtagctacccagaatccatcatccgtatatgttgattatgacttataaatgtgtgtgtgtgtgtgtgtctgtgtgtgtgtgtgtgtgtgttgtgggctatttgtacactgtgaagttgtatttcagtgataggtataataaaaagctgagtgaccaatacttagggatgagtggcacacaggacttttgggctgagagagaatgcttggaagaagaatcaccagccagacacagaggaagcaggatgaacagtacagagtaaaggtaaccaacccaggtaaaagaatgtagatttggagatatgggctaatttaagttataagaactcctgaagaacaagcctatgctaaggctgggctttcataatgaataataaatctccatgtcattatttgcagtctggggtccctagaaaaagaactactacatatggtatccactgtggggtatgtattttcacataggactcatgaaagcgtaaaaataaaaagttctaaacatacaaacacagagtcaaatatggcttcctagtccctagtttctcagggaggccactggtcatagagatgcagctcctgattgctgcttgttggcttgagccagccaactacatgtgctgagataagaactgtgtttaaggcttggctcatgtggtcagagaaagcaaaaggtaggcagtaaagcagtccagaccaagaaaacctttaaacaaatacagtaaaagatgggtatagacagtcacagaaagaaaacaaatagtttaaaaataatagtctttaagagaaaataaagtaaaataaagaaaagccctataaagatggtaaatacacaggtcatctggatcctgtatggtgctttgttgaatttgaatgttttgaatgctgatgaccaaagagcagctgctgagagaaattgaattatgaaagggattgatgatttaaaccaccctatgtactttagacatgtcttggtttcagaatggatgtaataaattatgatgcattagggaagtggttatgcctttgtttccacaggaaacaaaaagttatagttttcttcaaaattaatgaagatcaaatttgatatgagtgaggaagccaggaaaaagtacaggacaaatgacatatatgctgatcttttacatggaagaagttctaatactgagacagacatgatcaatcttgttggctacagaatcctcatgacttactattatatgccatcctttcaaatagcatggatagagatttatattagagtctggttatgcagtctagactgacttataaagttgacaggtgcctattatctgctcaaacaaaaaaacagaaaatcatctttagatgatttatgcacaatgcacattccatacttgtgttaatgcagatatatgtagcattaataataaaaacccagagacagatattggggttcaagctgaagttcagaaaaggaaagcagccaaccactaaaggactcttatttctaccaaggggcaattgtgtcctcaggatgacttcagactgaatacactgcactcctgtctccacctgccttatattcctctctagtgatgggattaaaggagtgcatcaccactgcccagcttctacggaaaacgagtgtggctattaggattaaaggtgtctgccatcactgcatggcctctatggctgactagtgtggttagctttgcactctgattttcacacaagctttatttgtgagatcataaacaaaatatcaccacagatgcatgtgttacctttagaattttgtgtattttgagaaaacaaggaccacacaacaataaagacaagcagcccaggttaccagcctcttaaaatgcctctgttacagtttcctcaaaattctgcaaccagaacaatgtcaaagatgctaactgagatggtccagcctcacagactatccagccaagatttcagataagctctatactttccactcacacagaggctaagcaaaaataacacaactagttctcccatgacttgaccatcatcccagttttctcatggtctcctaaagaagccattatatcccacatatcaggacatatacagaacaagatgcccacattctgaagagctgaggtggatggtttttagtcattctgtagtttatggatatttgtcatcatttaggggaattagttacaagttgttattggtaatggtgaggaaaacagctgaacagagagattagattcagggatctctttcttagggtaaaaagggttatagtatagagatgataggatgaaagggtggattgtttccatctacttttgaacaatctctagtctcaaatattttatattagtatagacttttgtatattgatacaaatgtagggttatttttattatactgtttgtgtgtatctattcttgtttacagtattgtacctatgaagctcatctaaaaatgtaatgtaaaggtttagttcttgaaaactgtttaagataataaagacaggttagtagttagtcatctataataatcaaatatatacccatgttataaatgtttccaaggtcaaacagagatatgttttaaattgatagatgatcttcaaacacttcagagatctaaagaatatggcatttaaagtatttaagtaacacaaggcttttcatgacaatgagacacatctgctcctgtcagcaccaatttacttcaaaagaggatgacagtcatcgaagtacatccatattgagtttactttcatttgtggcaaagttagccactgagcaaagaaattgccctggatttgagtgctgacagaatgctacccaaattagacaagcaggacacaaaagaaggcaactgccaaactttgccaaagcaagatagaatagtccttcaaaatccctgcttcacaaaaaagtctgtcagactgagatggatgtcccaatgttgttgatgaaacttggggtgactgtcctggcatccagatagctctgttgtttcttagttttggaagttgattgctctgcacttcctgtttaaatggataatattgcatcctccttgggtatctgacagggttaaaaattatatatagttacagttttctatagttttgataaaaagtgaaacagatacaaaacattgcactcactaagatagaatagataacagattattttctctgaatttaccaaatactaatggactgaacattgcaaatgtattgcttacttgataattgttctcattgtatataactttactctgttagagttaaaaccttcccattttatttatacacaaaaggaaatcttgtgtgatagttgtacattgtgaagatgtatttctgtgataggtataacaaaatgctgaatgtccattagtcaggagagatggggggacttctgggcagagagagaatgctgagaagaagaaagcagagtcaccagcagacattgaggaagcaggatgggcagcatagagtgaaggtaaccaagccccctaaaagaatatagcttgaaagatttggattaatataagttatacaaacagttagcaacaagcttacgctaaggctgagctttgataattaataataaatctctgtgtcattattgttggtctggcagtcctgacaagaaagaactacaactactattactgctactacacacacacacacacacacagagagagagagagagagagagagagagagagaaagagagagagaaagagagagagaggtagtctcttttcttctctcatttatagacaaactcataaaaatattttatgcatataggaaaatgtaaattaaaaaggaaactttagaagagagaaagagttgatctctacaattaagtagcttcaactcatgtgaatattctccccaacacaaagaaatttgttcagaaaattcacactaatctaaggtataaatgttattttcatgctactgtgaaagcagagtgaaaggaattgatctattttatagttacaaagcacatctggaggaaaaatcattatatctgaatattacagtataacctgcaaccattttccttctcaagtgcattgtctcaaatgtaaaatccccattgtattcttaactagctacagagacttggctgtgaagaaactcaggtaaatgactcttgcttgactctctacctctttaattgtactgtagacttctatcaaatgctgttgaggacatgtacctaattgattagtaatcttgcttaatcttgaacaaactttaaaatgaaaatattctttcacatattatttaccaagcatataccctactattaataaagtatggaagataatgtgcattctttacagcccctttcaaaatcttttattccttattttattgaatataaatattaacagaatagattcaacttaagatacagtcatgttaagttagtatgtcaatatatttcccttaaatataacaactattgtaatattcttctctgtttcagataactattaatttggatcctttcttttccttttattgaaaatatattttctcacatatatatcctgattacagtttcccctctttctcctcccaggtcctacctatctcccctccatccatatctataccttttctgtttccaattagaaaacaagaaggcttctaggggataatgataagataaaataaaatatagtaagataaaacaaaaactaatatatctgaatagggacaaaagaaaagaaaatgagaccaagaaaaggccaagaaacagatgaagatagacagaactaccagttcccacattcaggaatccatgaaaatactaaactggaagccataatatatactcaaaggactgtagtaaaatggagagaaaaaaatttaaacaaacaactctgacgctgtaggaaaaactgtggccagcctacccaagcatcagtcaccctgcccaggtgcagccgaggccagccctcatgagcatgcacagctggaacttcctccctgagccaagccttcccctgtgcccacagactgatgactaagaaacacctgacccagagacaccaatgaggaaaggacaacacagcagagtcagcttcctgacccaatgggaccttgggaggggggtataaaggaaggtgtaatttccttaataaacaactatgcagcacgctctgttactcactgactccctgtgtctgagtactgaggcattggtgctgcatcttctcacccactcccccaaggggtgtctgagcaggatcaccggcaacactgacacaacataataagtcaaggaccctccaaaggtaatagtaagtttattttctgttgtctacctactgctgggcatgtagtagtttgtttccccagtgagattccattggcagaaactaaatttccattttcatgtgtttactaattacaggtagctttgggttagggattggggactgtgtctatttctcctttcatctctaggaccccatgctgccttagaatctgtaagttaatatgtgctgtatttagaaggccttcttttcttggtgtcttccatcccctctggctcctacactctttcagaattcttttcctttgtgttcactgaaccaagaagggagagatttgagggagacatcctgtttaaggttgagtatccctggattttaactctctgcacaatgtctggctgtgtgtcactatatctgtttccacctgctgtaggaggaaactttgatgatgttgaacaaggcactgacctatgattacaggataatttcattaggcatcatgttattgctacattcttttagtataacagtagtatttttttttaccctagttctctgggttatctagtttcacgtccttggtcaatcaaaccggggtatggattccatctcatggagtggaccttaaatcaaatcagatcttggctggctagtcccacaagtttgtgccaccattacactagtatatcttgcaggaaggaaaccattgtagaccaaagggttagtgactgggttggtgtttccatttctcctttgatagtttcagagtacttgttttggaaagacactagccagtaagggtgaaagctctatgtaagcaccagctagatgtctccatatttaatgagggatatatatatatatatatatatatatatatatatatatatatatatatatgtttttcttattggttaatgaataaaacactgattggctgattggccagagaggaagtgaaatannnnnnnnnnnnnnnnnnnnnnnnnnnnnnnnnnnnnnnnnnnnnnnnnnnnnnntttttcctcagcagctcaacctctctatatatatatatatatatatatatatatatatatattataagtctttaataactttaaatcagaattatttggtagtactaatgtaccatttctacatattgagtgataagatgttaacaatctatccttaactatacagctaaatagtcaagactattactctggccaaatatgatttaaaaacagagagagaatgatgagcaacagaataatcatgttaagtcaaaatcactgaaaattgacataatttctatcatgaatataagaaaaatctgaattattcattggttaaaaaaccatgtattttatgaattctcaactacaaggaactaaaacctctgagactacaatagaaatttaaacatgagagactggcttgtttctgtcaatagaatatttgttgggaaatgtttggtttcaaataataggagggtaataaatctgtaacgtcagcggtctgtgagggcactgctattagaagccaaaagaggagtagacagttcatatgaatacttaagaagagaagcagaagtaaagccagaatttaagaggaaactacatttaaggatcaaagggaaatgtttatgggacattcaaagttttaaaacagggagagagaaagcatcatataaaatgttaaccggagtgaaaggatgacaaggacacttagcaaatagggaaatataaagaaatagagatcacttagcagcataccccttattgtttatacaatatcattattagcaaaatggaatttcagtgaactgtaaaatgccatggggtagcaattggtttatacctcctaaggagaacaaaatacctggatagagcagaagtggaacaataaagaagcttctagatcaagggagtctgacgcattggtgagatttaataagtgccagttgagaaaaggttattgaattttaggaaggcaggtggtgatattaacagaatgatttcagtagcagggggcgttcacaagctggatttgcaagggattaaaatggaattgagtagaagctgtgtcccaggtataggtcacatatttcaggggtagataggcaataagaagacacaggaaatacgattgtccccaatacagaacttaaggagaaatccaaaaggcaagagtggtcctggataacaaattgttggacataacttgaaaatgtgatctcgaatgacagccacatattttattgagtagctttggtctccagaatgtagtttctgcactcgagctgtgtaaaatctatttagcgaagaaagcaaatggtgacagttgtatacaagcttagcaaatcatgtctggattagggacaagtgattggagcaaagacaacacaaaggagaggagcctaactctggcaaaggtaactgtccggttccagctccagcatgctagaggtggagacctgcctgaatagcaggtagagatgagtatggtttcgaagcagagaggagagtttttaaccagtatgtgggatagagaggcaaatgaaagggttgtatgagttttatatgtaacacaaggaaatgaaaccagaagacaacagctttgcattattaagcaattttgctcaaggtatggtcctgtccatcatcatctcaggcctggtcttacaaagtgggtttataaattactaataaattattaatttgtaggttgtgagttgttatctaccaaagggactgatcaggtttccacaaaacagtatgctccagagtaaggcctctctcgagctcaaggatatcatctcagggtgggctttctcaaaggtactcctgttcttggaacttgatgtaactgcaggtacaggataacagcatcttcttgcttcatgggatggggtagataatgtgggcagatactccttgagtgtttcacatgaatcagagacatcaggcttccatcttggttttagttacttgtgtattcaaaggaggacccagctgcagagtgcctgtcccagggggatagaaggttgagtgctgaaagttctcccagaggaggttttcaaaccaaagaagatggaaggtaaaggcagaaatgtaacaataagtctttactccatctacccaagccctgccttggggtgtggggtgatcccactcctgacaccagattttgagggaattaccaataggatgctacacctcctttcctccattgttatcactaacgataatgtacatctagttagggatagcttcctattgtttatggttggattggaaggaggtgttcaggcttggacacctctttcagatgactttagggtttagttaaaatagaaatagataggtggtgacatagcagaatattgtatctccttgtatttcacctttatgattattagttttggatatgttaagttttaatcctcttttaaactaaaaggggaattgtagaggacattgtaacaacacctgctcggggctggctgcaggtgtgcctgaccatgcctgctggaggaagatctaagagtgagcggcaggcacatggaagccccttcttcttccttttcatcattggcttgctctacttattccatgccctgccagctggctaggttgctctgtaagtaaggcatttctctaataaataccctaatatctttacctgactctgtgctggtaattccctcattatggaaatgaggtgaaaaatagcatatgggagttatgtctccagtaagaggagactaaagagaaatgcagtggatgaggtcagtgtgggcctccctggtgattcttctgtagctgatgaacactcaatacaggatatttggtaatcaggttgcctggacacaaatcaaaaatttatggaaatttttagctgatcaagaatttgttttttatctcccttggcagaaaaaaaaattctcagattttccacaaaagttgggaagagcttttagacaatgaattttatattagtgactatgtgtttcttgaacttactgtggtttaatcccactaatgaattaaaacaatgtaaactgatgacagagctatcctcccaaagaccccagagcagtgccttttcttgcttttctagtttccagacaccatccacattctttctccatggccctctgtatagacaagttatgatggagggaattgtcagttctaattctgccatggatttttctatgttggtgatgggtaagtgcataaaatatattcagatctggaagtgtaaaatttaatgggaagcccctcagcttccattctgagtgccaatccaagctatatagaagcccacaaaattctacagactttgggtctcattccttttggtgtgtgatttttttatttatttgcaaatatttttaataagaaagtttaatacaatttttaaaaaaggtagaaagaatgaaagaaaaaacagaagattgtgacacaatctctggattaaccagtgagaagaattcagcaaaagccaaatacagagatattgtagccattatctatgacaatgaaagtgttgaaaacactgaaaccgagccagtgcaaccagacatgacaacctgggttttatcaatagtatccacattgtggaaggagaggaaagactcccacaagttgtcatctgggttccacaagcatgaacacgaacacacacacacagtgcatttttaaatgtggccaagtagcccactattctgaaatggaagtgccatcctagtggcattttacacatagtggtattaattccagtcatttaggaatcaatgtttgaaggcaaaagacctgcattcatatgggatgttatccattacccacttctccaagggacatcattatttcttgcataagtaatacagaatacatacattcaatatcagtgcaataattgataattttaatgtaaaggagatttacaaactttagagctttgtacatgttgattgtaatggctttgtattgctagactggggttgtttaggttgtgatgtataaggagaaagactactacttttgttctccaatctgtgcctgaagtatgacataaaggttttatagaagtaagaggattaaatcagggactattttgacatctgtaatggaaatagaggaaggacaagatgaagatgtaggcttggatgaagaactgtaaacttcacaaaaagcactgcaatgaaacctaacaaggaaaaatagccctaggaattaatggtatatttgttgaaaataggaacagaaataaaggtgaacctaagacatgaaacagatattttgaagtaaggttatcacactgcaaaaatataactgaagggtatgaagtatgagtatgaagatttgaacatacacacgcatacatatctatttctatagctatctatctatatatatattatatatatattatatatatagttctatgaactatatatgagacactgttctatgaagtgaaattgagaaagaaaatagatgatagattagatatagagttgtgtaatagatttaaagtagatataggtagataacagatgatatattcaacaagtagatgataggtaaagaatagatgatataatagggatagatagatagatagatagatagatagatagatagatagatagatagatagatagatagatccttttgtttctttgtttctttgtagccattgctataacctctctgtggattttcatgtatctaaatttttttattaaaacaagtttaactggaagccctgtgtctgcttgctcttgttgttgaagaattatttctgtcaagcatcattttatgaacccttttcatatagtagaaactgaacaagcatacaaattaatcaatcagctacagtacatattaggatttgtcttacagcaagctattttgtagggattaatttctcctccataaagaagtaggaaccatttctactctttttccatcactagtattttcctataatatgatgtttaaactcctggtccttattgtttcctcagttgtgttaagaccacatagtatcaagaacaccctttatctaatcataagaaagtgatgaaatttttaacttccatagagggctacatattttaataaaagttatataattaaatttgtatatcaggttcacctgaggaatgttctgaaatcttattatgtataaggctgctagcatgggaagaaggaaggaaggaagaaggaagaaaggaaagatttttatagaaatcatttttttctctcctatctataaaagcttttactgttgccacagtataacagataaaattgcctttttaaaattgtatttttacaattgcctgccacaaattgtcactgacactgaatacacaatctatatttttgcttcctccagcactttactgaatttatattgtaatatgagttgaaaattaggcagtggcttggctagataacttgatagacagttcttccctttgcttctacgaggttggaataacctaagactaacagtgggagaattcacaagagatgcttctctttacaacatgatacaacattttctttctatttaccagtgagaggcacctaatgaaaacaacagagtgcctggcagaatcagagatactccttcccataggaaataaaagaaaaacgcgagattgcttgaatacattttcagaaacattagtcttttcattccatttcattggaaataaacaaggagagatctttgtgagatgcagtggtgaagaatgaactccagtagcaagaccaaatcattagcaaatggtccagtcagtgggaaagccaaaactagacagtagtgaaggcatggggagataggggttttcattatagctgctggaataggctggggataggaatgtcaacaggaactcatgcagataaactggtgtgttgctagaccacaaatgaaagaactacataaaaaattcctcactaggctagttctccaggcagcttcactgtttgctctcaagtctcaagttatgatcacttactcatctgagttctaagcataccattgcagattcagtgatctctttaactatgacctggccctctccaggctctgcattagattgagtataaagtctgagctttattgttaaagaatgccttgaagaaagggatcctgctccacacagttcataacttcttcagctcccttggcatctcaggacaacaggcaaaggacacaaagtctactagaggcttcatttttcttcgatgcctattaatctcagaagatctcatggatcaatttttttcctggccacttgtggtcagagatgatttgaaaggcagggtttttccaatttgattcaaattgtcataatgtatccagaaaattagtgtctagactaaaatgatggtaattgttaaggtcttcaaagtagaagtttttgaacttgagttcattcatgtgtagttttctattgtttcatttagaaatattttattgtacaaatctaaaacatgtaaaggttaacattacattttcaaaacattaactttttaacttttacattcctaccatcctttttctataatgattgtgtgtgtgtgtgtgtgtgtgtctgtgtgtctgtgtgtgtatgtgatatgtatgcgtggggatatgcatgaccatatgtatgtgaacgtgtatatgtgtgcatgtacatatagaagccatcttgccatcatagactgttttccttagttgcactctagttattgaagcagggtctcatgtttagcttgtttccctactcatcttaccccagtggtttttcctttctgcttctcaagcactgtaattacaggtggacaactgtgcctctctggcctttgtgtgggtattgaaaccccaaactccagtcctcacaattggagagcaaggattttatattcttgcctcagttttgttgtcttaatgtggtcctttttaaatgagtgtctacaaacctaagatcaatctcatttatgaatgtaaggctttgattttcagagagcacacattattatatttgtgtgtcaaaataaataacactcattttacatactttcattttccactttaagtgaaaccaaaatgtattataggctattgagcatcagagtgtcttgaaaacaaatatttcaaaaagataaaaatcaagaaattgagcatatttttctatatactctggacagaatgagctgttgtgatttgaatgtaaaatgttctcgtgggctcatatgccgagacacctggacacagctgttggagctctttgggatttttgtggaacctttaggaaatgcagcctcactaaaaaaaaagtgtgtgtgtgtgtgtgtatgtgtgtgtgtgtgtccatatcataaggcccatactgaacaaaaaggtgaggcaggatgagcatgagtgagggtcacttctaggaccaattactttctgtaatagagaagtgttgaacttctgttgacctttgatgtgaagtaagagttgaaaatataaacaactgtacaaaataaaatcagggtctatttactacagagtagtctagttccttgaataatgctacctaacattaaatgctgcttttcctttactgtactttggctttataactacattggtattagtccccaaagtaagtgcccatcatccttaaaacagtgatgatgctgaagcaaatgaaaaagaccaaagttccactctggcaatgatgtaagcaaaaaggggaatagaccatttgtgctttcagtaaaagttatgactttgaaatgaaacaaaaatcttagtagggggtcttgtctagatcattcatctggtttatatccacttttcatcatatataagctgtttaagaactgtgagttacagaaaacttataataagcaaacatcaaattttgttatctctggtgaaatgcaattgattaattccagtggctagatggctgcatcttcctcagagcattagagcacatttgatgggtatgaggaaatagttctttaaagtcaactttcagtaagtagtagcatcttaataatacctcattttttaagttaaatacatttaaacttattttactaagagttatacttttgcttgaaataaacaatgctctttaacaaaaacaaaactctcagaagtgaagtttgagggaaagattggaattcatctgcattcagaaaagaacaagaaaaaataactttggtaatatctaagatacataagagaaaatccacctttaaaaatataaaagaaaacagagttactgagagactgtgggtgaagacacataatacacaagttagggtctataatgcatagcaaatgttgggagagtctttcatcctgttcgctcttactgtataacctttctccaatatctaaacaatgttttattattcctcttttctgtagtagtattcaccttggatagtctcaaaaactctagctcaatgtagcagcataggtcagggcttgcaaactttttctacaaaggttcacatcataaatattttatgtttttcaggccatatggtctctgtcacaactattcagcttcctttttggagcacaaaagcagctacagataatatataaataaatgaacatggctgtgctccatcaaaatgccatggacgtagaaagaggacttggctcatgaggcatagtctgccagtctttaatatagaactattaaactgatgactatgcagaagattttgctctataattatttattatgtattcatgagggatcatagagaattctgtgcttgttatggctttaattatgaaatcatattcatcccaaaaatgtaacaaagaattaccaatagtcaatgtaaaaatctttgactcataaaaagtaatagccacaaataagtgactataattaagatatagggaaagaacagtgtttcatgatattttgtggagacatgagcaagcatctgttcacttcaaattaaggcaccaatgacatccgcaggaatgattttaccaatgtttagcttagcaacccagaattcagagttccttaaagggttatttacagaatgatgggccacatgggctgctgtgtcactggaaggcccacattagtgtgggtgatatgactcatggaagccatattacctgagttccatgcccaatcttcaagcaactaaaccaaagagtgttttctcccccaacagttgttactgatttatataaccttggtgagaagtcccaggagtctgtatgcttcctcttgacccgcctatgcccaataagttctcttctttatgcaataaggccatgctttgatttagaggaagtagctacataacacttgttttctttctataggaaaaccaaaactgcagtagacatgactattcttccaaagaatagaatagtagatataattttaaggctatgaagctgagatttatgagtttggtccacatcttgtcacagatctgaaggtagaattaaggacatattttctcagatttatttctcattattttgtaattatgtgtaatgagggaatctatgtgcacatgaatgtggattcctgaggattaaggaagaggtattggatcttttgaagctgaagttacaggtgatccactaattaaatgaacactggtgctgcaaacagaacccaaatcctttgcaaaagcagtatgtgctattaagcactgagctgtctcttcagttcccatatttatcaagtgtttgtgttacatttttggtataatacttaaaacaatgctgttttgttttataatgactttcacatttttgaaatcataatataattacatcatttccctccacttttctccctcccacctctttcatgaaatttcttaaaatttgtgacctttttttctttaactgatataccccaatacataaatacaacctgttcaatctgtacaatatgatttatatgcacatattcttagggctgacaatttgaaaatgtaaagtcaattgaagcttagtttccttatgtgttatattttgttgtgtatcatttgaaataagttttagaatgaagtttaaaaatgaacatctttcattttgcttattgtcaaacattttccaaattagctattcacttttgctttacctagctgaggaaaaagccacttctaatgtgaggaaacaatgacacctgcctgccatggggccagggtctatgaaatggttcctatgcctaagtcttttagaattactgaggcatgaaaaagtatgaacacaagtactcttgtgagcaccaaattgcaccacttgagtttgtgctctacagcattggaaaacttgattaaatttctcccacttttctacttaacatgcacagctttttttttttttaaccacatgactttttgttgttgttgttgttgttgttgttgttgtagttttgagacagggtttctctgtggctttggagtctgtcctggaactagctcttgtagaccaggctggtctcgaactcacagagatctgcctgcctctgcctcccagtgctgggattaaaggcatgcgctaccaccgcccggaaccacatgacatttttattgattctctgggagtttcacatcatgcacccagatcacaatcccttcccagtccttccgtggttgccccacccccattccttgtggcacctcctcccccttgaccttcccctgaaaagatgtaaaaaaaaaaatcaaaatttaaaaaagggggaaaatacaaaatccactttgtgctgtctatatactcactgatgaatcgtcaaattcttagtggcctgtcccttcaacagaactgagtccttcccatcccacacctctgtggagagctctccatacttaatagttaatagttctctttagtggcttcctatctaagctttcaattttcttcaggggaaggtgataagggggtaagggttgtcacagaagccttccatgtctctctccctctcaactgcatctgaagtcatcgacatcacggcgaaagtgtctctttacatacagcaggaacacagattcggagcttctacttggtttctggagacaacacagaccacgaactcatctgcctgcttcagcgggaccgctgatgttggcaagaccctcaaaggcagcaggggccacagacagaggtcagcatagcttcaggtggcagcgcaagccactcacatcaatatcaatatggttcccagaggcagcatgccccaccggcatagaggtggctttaggctgcagcagagacgagggcatcagcatggcctttggtggaaactcaggaccacagacagcaagcatagctttaatgactggaaagtccctagtttttaataatcatattcttgaagaaccttaagctcatattatgaaactcaaaataaacaatacccttattgttattgcaaatgggttaaatatacgagttaattaccagaggctatagaagctgaactgtagtttattatttccgcttactagtaggacatatttgttcctaatgccagctttccttttatgattttggtaaatccacaaggttttcttcagagaagtcttgcttgcttctgttaggtttattgctagaaaattttatatttttattggtttttcaaagggtacttttttcattatagttcctaactgcctatacttaatatgcacacataacagcttttgcctacttatttataagtggcttgttttttctatgaactcactgaaaataataactcaaggacactataattcaaggtttctaatcctagcaagaatgtttcctgttgcacctaaatttccatttcatttcacttcaaattagaatggaaagagtaggccagaaattaaccactgctgttttacctttgacaatatctgcaggtcatcccaggctggtaagatggcacttgccactaagcctgttgttctgagtttcatccttggtataccatatgctaaaaagagagaatcaattcccacaagttttcctccaatttcaaaacatgcagatacataacacacatacatctgcaaacaaactaagcaaatgcaattttggaatatttgtcttctcttgagagatacacataaaaggtcttattataaattatagtgccccagtaactagaaaaatacgttaagtgaatcgttacaaaacgtagctgtcataattctgtgtccttagcatctatagacaactccattcctaaaccttgtatctatgaagtgaagacagtgttcaaaatacagtcagtggactcctaatagtgcctaagttattgatacaaaaatacctttcataaaattattaaagtgctattgttcagtaactcttctgacatttgcccatggttttctactatagtcaatctactggtgcttcagtttaaatcaaagctctgagatgaaatggcatagtaggcaagtgatccctcatcagcataaatttgcagattaaaagaagagaaaaagtaaaacaaaaggttccacctaaatttttcctattgaatcataaaatataagtattaaatctcaatccacggctatattttttgacattttttatcacaacacttcattcagttccttagggcacctgctcttgagagtggtctgttggctgactgaagagaaagcacttttgtaacagtctaactactgggataaattagacaccttctccataggaatgtatttctttatcaaaattgactcacaggcttatcgttactcagatttcaatatttagctgatgatttattgaaaatgaattcagagactctgattttagggaaaacaactggaaatatttgtttccaagcatacaactatgtcaaccagactgctacaaaatgacttagttcaattaatcttaatgttgtactccttgatttcatatcctagctatgaatagctacattactttttatgaaccatattcctggtttgcatccaaagttgcttagagctgttttgtccaaagagagacaataagcctaacttaaataaactacatgggttacacaaaatcagaatctgcttccaagttacatagacttctgatctgcaaaggggctgctcttagccaggcctgggggcacatgcctataatccttgttacccgggatgccgagacaagagaattccgggtctaaagtctgcctgattatcgaatcaattcaagtctaaagtgattgatctaattaggtcctgcctcgaaataaaagtaagaaagagttggggctctgtatatttcagtagaaaagcacttaagcagtgtgtattaggatcatttcctcataaaacaaaacaaacaatgaaaactcaagtgttatattaatctttctaaaccttagtattttaactttaaaatgtgattaagctaccaaaaaatgacagcttttcctagaaagaaaattcatacaaatattaatttatggaatacatgatcacattagaaacatactttagccaagtgctaaatacaaagtatatatgaagactttctgaagaaaccatgattataatttaaccatttttaataatgttctgtatgtttaggcaagtaactcaatctaagcacttataataaagaatttcttggtacttcaaagtcatttagctggaatgttgaaatggtcatgcccaggaatgtgataaaatattttaccatttaccttcctaacctcagaggccattgtctaggtacatttttttaaaagcctcatcatacactgtccagagcttgaggtgaaatttcctgggatttgtcatctaacgactcaaagtcaggttcaatattgctgttacttttatgttttttgtgtattagacctttagcagaccctggcaccttccagtagacagtacataaatcctatcatctggcatgagtctaatttacaggcagagaaagggggaaatgatgtagaaaactgtttttaaagaagaaattagttctttgaaaatcatgttgaaatgaacacaaacattcagatatgtaaatcagttcactgagctggttaagacaagaaaggtgtctcagaggatgtccatgagcacagccccctaccaacgggatgagcctgcaaaaggcagaagctgtgagttgacctttgacaggtttccctatagtcatcagcctttgcagtttccagacacactgctttggtacactgagctcaacagccattcacatttaaaacagaggatgggaagaatccttctgagacattttggcttctagggaagagaagaaacataatctccaaaactggtgaagcctctcggtgagccacaagcgatcagcaggctgtgttcactgagataagaacaatcatcagtaacattactggtgttcctgccccagcaggaacctttgatgacacccaggcacctttatgtgattacttaattgttggtgttccctccctgagacaggtcctcactgatgacacccaagcacctttaagagatgacatatttgcttgtgaaatccacttcaaattattcctcattttaaactgattatattagctactatgtgttcctcttagcttttgttgaatgtttagtccacaaaacactattaggactagcctataatacattgagccctgatattttcatgaagtcctctaaatggtgtattttgtttttatttccttttcctactgcttatctgaatacatacgagtctgagtaaccaagggttctctaaaatgaacgatgtgcttctttggatgaatgccttcagtgtaaggattctcttttattggggatacattaaggtgaatttcacatctctgacgctcaggcatttaaaaaatagacatagagagagagagacattctgagggaaagttagacctccaaatttatcttatgctgcagtaggcttttatgtcctattttaagaactagtgctggctctctagtttaatgagcagtttaatttaaagcttaaaattattaagtattccaatagagtcataaataatgcagtttataatattcttatcaagcacatgaagatacatttgtcttccattaacgacatactttttaaagtagcctgacctcttcagatatataagagcatgcaattagggcaatttgtcacaggccttttacacgttaataagatgtaattaattgtctgttttgtctaattaacttttcagacactggcagctcctgttcttctgctgtagtgcaaggaagcaagaagaacttatttgcaattctaatatttgaccaagacttctgaccataaactctaatccacacacatacatacacccaaaaaagtagaatagaaggtgatggaaaaattaaactaggaaataccacattatagtttaacctaaaaagtagggaaaatgctacattaagcatgattcagattagaatataaatgacatgagaaaaagtagaaccatacttaagactttccatataaaatacattatccatacattctttatgtaagcaatctcattaatttgttcccctttgagagtcaactattccaagacagtttgttaggagttagagtttcagaagagctatgataaagaccttgtccttggtgagctgccatgacatcaatggttgaattaattgagccctgaagatttctgcactaaattcataatctttttaagttttgaaatgaagatgagaaccagtatcattagcatatttgttcagtatgtgctaatgtatttagtcattcacattgtaaaattaggacattggttacacacatttgagaactttgagaaatattatgctgtacattattttctttattagttctttgactcaaagtgtcactagcccaaggagcctccaaatccttttatagggcaggtgggactgtatcttctgaccatcctgcctccacctcacaatgctgagattgcagatttaaaccaccacacacataaaaaattactttatgcagtatttttagacatttttcaaatctatgattttaatgaataaaataaatctcattatttaaccataatttatttaatattgactgtaaggcaaatcatccatggccctttaaaaagttccagatagtatcaaatgctgccacttgcatagagtgaaagaaatttttcttcattgctggtgagtctacaaaattgtaaagccactttggaagacagttggcagtgacttaattagataaacttcatacaacccacctgtcacttcctggtataccaaaatgagtttgaagcatgttcatgcaaaactctacacataaaatagtaccaaggctgtaattatagatagagcctctctatatgattgcaatagactctcaagtggaaggtggttttccattatagcatatttagctgattacaaattacaggtcaaatagtacaatatttggcattcttcatagctaagattattttgtttggttggttggcttttgtttatttgtgtctagtgttcaccttagatttgagttcttgcacaataggtgtactatgtgcatgcatgatacttgtggaggccagaagaaggggtagatcctttcaaaccggagttacagaaggttgtaagctgccatgtaggtagtattgacccctctgaaagagtagccagtgtttttaattgatgagccatctttccagccccaaatttaaaaaaaaaatgtttttttgagacaggatttctctgtagctttggaaacagtcccaaaactccctctgtagaccaggctggccttgaactcacagagatccacctgcctctgcctcctgagtgctgagattaaagatgtgtgccaccactgcccaaatcaaattaaaaattttaaaactatatcatatacaaaaatatctagaaataggatttctgcttataaataccagtctaggaaggattgtttaattactttaaaaattcacatttaattaagaagggtgtttgcatggtggaattttaaagatgtctatctaacatatttaagaaccatgaagacaaataatcaaagagaatctttaaattacagtgactgtacgaacatcccatgagacctctgctaacaagtcctaatctatactttatttgaaaactattaaagtctcctatcatgattgtagcaaacatattcttcattcttttttatttttactgtgataaaatgaatgccttagcagatgactctttgcagtctcattgtcacatcttccaagttctgatcctacctttgtcttcaccagtgtgtggccaagcacaaactcctcaagcatgcaggcctcagtttcttcatcagaaaagcatctgtctcactgaggaagcaggaggattagctgtgtcaataaatgcagaacacttagacagctcttctttggtggctaatgatccctaaggaagcataccattaaactggattaacactctctcttccccaatattcacctgcatgccaatcaatcgttagtccctttaaattcatgctgagtcttatacttttatttcaaggttttatttataccagtcatccttttaatttatattggagctacaatgacataaatgaataaacaaatgcacaaagtacctgtgtaaatatgtacaacacaggctgtgtaagaagtgacttaaatcttgtttcaatttgttatttagtcacattcctaaattctgtatgagtttcaaagattatttcttggtcatttgtggttatgatggattactggagcatggataatttataatgaatatagaattatttggtcactgtaccggaggccagggaattcagtatcaaagagtgggaacaaggtgggtcaaagcctactggataatgtccccatctcaccagtgattgcagagcatcagtgtggtcaaatgaatgacctctcaataactcttgtaattatgtactctttatatggtatttttttaagtttaaattagaaacaagattgttttacatgtcaattccagttccctctgcccccactgacccctgtcccatcccctttctgctcccttgggagggtgaggccttcgattggggatcttcaaagtctgtcatatcatttggagcagggcctaggccctcccccatttgtctaggctaagagagagtattcctctatgtggatggtctcccaaagtccatttgtatactagggataaataccggtccaataccagaggccccatagattgcccaggcctcctaactgacacgcgtgttcagaggatctggatcagtcctatgctggtttcccagctatcagtctggggtccatgagctcccccttgttcaaatcacctgtctctgtgtgtttctccagcttagtcttgacccccttgctcctctctctctgcaactggattccaggagttcagctcagtgtttagctgtgagtgtctgcttctgattctatcagctactgcatgaatattatttcaagtttattcttcaaacatgtaattggattccccataagtttccaatctgatctttgtcattaatctatatttgtaagctttaaaaaaagaaaaacctattaattgtttttttatttttgtcttgattctacttagatttcctgagttcatctctcctttattggagaccatatctttcagtacgtttttgtttctttttctgttagagcatgtatattcatttgctgatctaaattaaggaactagttcttataactgtaattatttctggcttttttctgaatttttgcaaaacacattgtgcttgttaattgcttttgtttgtttgttgtatgtctatttgtttgtcaacttgatgcaaggtcaagtcatttaagaagagtgaaagtcaattgagaaaatgcctccttcagattggcctgtagacaagactgtgcaggcattattttgaatgatgattgatgctgggaagacccagcccactgttagctctaccacctgtggccaagtggtccttggtcatacagaaaggcgggttggacaagccatgagtgagcaagccagtaagcagtgttcctccatgtttcttcttcagttcctgcctctgggttcctgctttgagtttctgccctgacctccctcaataatgaactctaataaggaaaagagaataaaccctttactcctcaagttttcatggtaacaatcaaactaggaagcaggtaatgtttttaaaaattatttcaaggactggggaatctggatttatgctcattgtgaactttgcagaatcaaaaatcacgttggagaaaaatctttgggcatgtctgtggaatgtcttagagattagtttaacagaattgataagatgctcctcctccaccaagtgtgggcagcatcatttttaaggctgaagtcctagactggataaaacagaaaatgtggatagaaggagaaactaaatgagcatggacattcatcactctgtgcttcttgattgtgaatgcaatgtgacaagctggtcatctattcctgccactgtaccttctttgcctgccagcaaatcttttctgccacagtggaatcctcttgaaccacaaaaagagtaaatccttcattccttaaactgcttttgtcaggtattttattacaatagaaataaaactaagagaaacaaattggtacccaaatgtggtgccctagctgtgataaaggtggctaagggtttgggacttttacaagtggttttaagggggattgtggaagagttctgactcagactcaggaagtgctacagcagagcttagtggaccatgctgctaggagctgaaagaaatatgctcagtggcatcctagcttttgggatttcagaagggaacagggactctattcagaattggagtaagggtcatttatgcaatattttcacaaagacactggcttccttaccctgttatctcaagaatttggtgtattagttactttcttattgttgtgaaaaatatttgactgacacaatttaaggaaggatgtgcttgttttagattataattcaaattgaagtctgtcttggaagggaaatcatggcagcaggcaggaaaagaatagtgacaggagtgagaagtggcaggagagactagccatgcatgcccacagtcaacaatcagaggcagaagaacactggtggccagtgcaatttttctttcattcactccagcagttaggatgggtcttcctagtgaattatcctaacctaaaagaacatgtattgagggacatgtctccttgttgattacatatccagtaaagttgacgaccagaattagccatcacattgactgaggctgaagacagaagtagggaatgagtttgcttggtgaagaacaattgaagatagtgtatcattctgggtattgtttgctcttctcatcgaagtctatggtgaaaagagcaatcagtctgtgtgtcttaccctaaatctgggcagcattactctctgagccctggtcctggattgtgtaacaagaaaaaaaaaaaaaaaaaaaaacaaggatccatgagcttccttcactctctgcctcctgtttgtggatgcactgtgacaagctggcctcttaatattgttgtcatattatcccttacacaaagaaaggattttttttttactgtaaaccgaaataaacccttctcccttaaatccttttggtcaggtatttcatcacaacaatagaaaaataactaatattttgtgtagctgagtggtaaacatcatgcacaaagacatagttttaatacttagcaccacaagatgatgatatattaaaataataataataataaacctcagattttaatacttgacaagcagaagttttttctgggtctacttttttgcctataagctggatagagtagatgatttgctttcagtatttctcgctgcataaatggatgttagcaacatgctgacgctatcccctacacagacctactgctctggttcggacaggtgtttgacaaagaaaaatgtgttcttcttcccattgtactcctgatggaacatggaagacttgagaattaagacccagtgggagaaagaaggtcctttatggggctctggtatctgttgccccatttttggctgctggccatcacctctgagtgagcagcactctgtgtcactggattgtctctctgatgtgctaatccattacatgcatgagaggaatggagagaaatttccaaagctgtaggctaaagcaaactttgtatcttttaaagttgatcacatgactccaaaatcacctgcatctcctccttcaatgttggcttcatccactgtgattgaaacttgttttagcatgtgtatagactctgtggtctcaagaaacagctgaaaattccattattaaataccacatcaaagcatactggtataatcattataaaagtttttgttttgttttgtttttattatcttttcaaagtagacaacacatcaactccataagattccagtaatgctaggctttgatggctaaagccagataatattgacactagagggggcctcatcatcatcgaggattgtctctgaattgtatatttaacagaaaagttggccagggaactgaaacaatggatgatggttccacaggggagactggaatccaatggaagttcacatagaacagagatttttctaagatgtttcttggactcctgcatcagcatagtgaacacacaaagcacaaaaattcactgatttagaagttagttaccatcatacaagaatacacaattagtaactaagttagtgctcttacacacacacacacacacacacacacacacacacaagaaccttctgtgtccatgtaataatgttttcaaaaccttccaagtgaatgtcactgcttaggaagtgacaagatgccaggctagccacaggaagatgagcattcggtgagcctgttacaaaatctggcactttagaattagactcttgcctgaaattcagtacaatactaaattgacaaaggaagaaaaagatgagtatttgttgttaggttcatacataaggcacatcacttaaggaggtactgaagatcagcttcttccagtagcataaaaaatggagtatcttctcatcattaattcaatgtgcataaaaggagtttatctttgtaaaacacatgaaattccatttgcaagttccactcaacaccttttcctttttttctacacctttagccatatatggttcaaagtaccagatttcaagggaatgcctgttcttttgtgacatattagctagcttcaaaaaggccctatttctgtaaataaaaaaaaaatggtaattgactgttgttagagaaaactgtctatttggcagtagtgacacagctgccacctggaggtctgttatctaaattacagaattgggtctgaaaatagaacagtttttaattttatttattaagtttttagattcagtcatttaaaggaaaaaattctgtcataaacatcaatataattttaaagtaaagtatataaagcacgatacacagaaatgattgaaaaatggatccgaaatgaaaaacatcccaattttaaggttcccaagaataagagatgaccacacttgtttcgcacctgttctgtaacaggcatggtcaaaacctaaaaacacatgttattagtgagagtggctcaggcattactactttcacacactcagataagcatggcaggaagactcagtaacatttctggatttttttacaagctagtttgaatgttttattctctgcctatagtttcccatgcggaacaaccagacagaaaagtgacaggaaaaggtgtcattctaagtagacactagattcacagggtttgtgaaggcttgatcgttctaatcttatcctgtgtgttcagacgtaatcatttacacccttcagcagtcctctagggaaatgaatcactccatccaatgccatgtctaaaactgattcagaagattcaggacccctaattacagtgttgaaagcaaacacttctcaatgagtacacaaattagatttctcccccaggctttcgtaaggactcccaaattacgtaattgctcattgactatttcaaataagtttgaaaaactctgaaataaaggtctgcaatgtcctgcaattaataccaaaatgtcaattgacaagacagattgtctgattagtacaacagtttatgtggggactgtgcaacatgcatcattataatctcacctttccccagaatatataattaatcttctcatgtcttagctttctaaacattgggatacaccacccgtgggaagaccctatctgaaaagcataatctactggctctggggagatggctctgtggttaaagatgagtactgcccttcgagaggatccatgtcaggcagctcacaaacagcagtaatgccaacttcagggaacccagacacttttgggctctgtgagtgagcaccttcattcacttgtgcctgcctacacagtatgtcagtactgaatatttattcacaaaattgaagtgaaaagtacctgtttagtgaagtcatagttcataaatgtcttgatgcgaaagattatcatgaattaatactaaacatgatctctgaatgatctggtcacttgccccacatagctacttccttgaagaaatgaatttattcttacttcagtctgtgaaataactttatgtacacattttttgatggtgatgaaaataaatagaaagacagacagacagactttttaacaaaagtatttatagaaaatgtaaagtttccagagaaagagcatataattttgagtacaggatttatgtttgcttgtatgaaattctgtagtgaaaaaactactagggtgaaggctctgtctggttttggaacagctaaatgatcttatataaatcttcccgtgctgtattgcatatagactgacagggacagaataaaaaccaaagcaaatatgaggtaaaaatgattttttattactttaggtatttctagatgtcagataaaaatgagaacattgctaaaaattttacagagtgacagctctgccttatggataaaattctacagtttgatgtatgaggcagaaaatgtgaaaaatattgagaagtgctgccctgacatgatgatggaagggagctgggtgagtgtgagcaccatagaagtgtagtggagcaaagtcaaactagagaaggatatagtcctttttgaatcctgccgactacagaagcacaaactacaaactgttcacttttgtttcacctttttaatgaacttttagacatgctcctttattgatttccttgaagaatagcttctcagctctttccattgcatatttgttttccagatacaaaataaatctgaaaagttctttaacaatggagattcagtcctctgctgttttgaaaagatgactaatattttatactcctgttcttgctccatttaggcatttctaagtatacctcagcccacatgggaacatacactgtatgatcatgtagtgaagttagccattgaggaatgatataatttaagtaccctgtctccttccctctaagggaacttacctgcagttcaaactattgaagtccttgctcccaagattttgctcttgcactgaattagatgagcagtggggcctgaggcctttggtttatactgtttagactcctggacaagtctggattcataaatctttctatgtctgaaaaaaatgacctccttggctccctacaaaacatctttcctttaaataaattatgttcttcttaacttatctaaaactatttctgaagtagaatacttaatggctgagctgtgtcatagagtaaaactggtctaggaagatggcaaggagagtgagtttaatctctagaaccccatgaaaagccaagaacatgtgagggctaactgcatggtccaaccagcaagcagagctagggaattcctaaagcaagctggccagttagaatagctatttggtgagctctgtggtcaactgagctcatgatgactgataactcaggcatgagactccatgactaaggcaacaaacaaccaaggaagacacctggcatcaaccttgggactccacatcaccatatgcccacataggagtatccatgcgtacagatgaccatgacacatgcagatggcatgcacacatacacaaacacatcatatagacgtatggtaagcttcatgacatatgggtatatttggacatggcaagtaaatcctgaatcctctagtaagataagttctgttcttccacacacagagatgagataccacacgactctcacagaaacacagtcatcaccacatcatatttctgttttaaaaatccttcttggtagaattatttatattcccacaaatacaatcagctgctaagtttttcttttttaactaaaaatattcaaatacacatacagttcttctaatacaccccctacttttatttcttcctctcatcagtcctcctttgttcctttttcacttcaactttcatgtcatatatacatacatgtttttaagtatgtgcataaaatttagaatgacaaatgggataaaacacagcatttgtccttccaagacaggtttaattcgctgaatatgaaaacctccagctacaacttttttgtaaagcaacataacttcatctttatgtttaagaaaaatttacatacacacacacacacacacacaaatgcgtgtgtgtgtgtgtgtgtgtgtgtgtgtgtgtgtgtgtaataccatattttctgtaaccattctaccatttgttttggatacctagtttacatctataaattagctattgagaatattgctgtaatagatgatatgcaagtgtccctcggatgtgttgatttcattaaaaatcagattctctatggactgatgaaaagacaaataaatgctattcaatcgtgtgtgtgtgtgtgtgtgtgtgtgtgtgtgtgtgtgtgtgtgtctgtagcaatcaacctttgtgcattaattttgaattaaataatacataatgtatctttctgacataatgtaattattaacactaacattatgccaaacttttccatcagaatatagcctatatatatatttctgtcattaatttaattattaacattaacattatttcaaactttttcagcagaatatggtctacaaaacaaacttatatttcacattagttgtgggctaaatgtatatttgtctaagatattactaaacattagtatggtatgggagtgaacttgggagttcaccatgctaagcacaaagtctaccactgagtgactgtcccagcctcacttgtgcattttatcttgagacatggacaaagttgaacttaaactttctctgtggcccagatagaacacataatcaccctgcctctgtttccatttatgtcttagcctggcataatattgacaagcattctgttaaaacaattgatgcctattcactaagtgtttatttaacttcattgtatcccacctcatttaaatcccagaatctcccagtgaacataagccaagtgctaagtgggaagctcacattgaaaaatatgtgctgtccttgttggatttggtggcataaacctgcagtatctgctacttgaactgctgctcctgatgaggcattaggattgcaacttcaaaaagaattcaaggccatttgaaaagacatatccagtccatggatccaagacttaagaggtaaaaagagtcctgagagcattacacaatggtggggcactttctagaatgcacaaagcccaggattcatccctagtacagataagggaaaaaaataattctttggtatgttctctgtgaacattcttcccagccttctgaattctatacatcgaacataaggattttgtcaggaaaatggcagttttaaagtataaataggacacactttacaggtaatattggctagaattatgaagtctaattgaatttcttcataaggtgtttgcatcaggaaattactggaaatatttttaaatagctactataaacaaatgtgcattacaaagaatatttacaatatagctgatgcaatggctcagcaggtaagattatgagctgtacaagctatatgacctgagttccattccggaattctacatagtaggagagaactgactacagaaagttgttacctgacctgcacatagcaaaggcagacacacgtacttgtgcacatgcacatacatacacacaggtactctctcttacacacacacacacacacacacacacacacacacacacgaataatttagttttaaaaattaactctagtataccttatacatccctgacattttctcacagactacagggtactataagatttgcttgaaatagattttggcttattatttttaaaatacctatggaaaatgccatacatcgataatttgctagtgttaaggctgtaaattgttaatggaagtagcttttgagtctccttaaccttcagtgacattttttgatttttgttgtctaaatggttctcctgcttaatatgtgtgaatgtttcctcagatcccctctgacacgatctcagttcaacattagctgatcacacattttcttcccactggatgtaagatgaataaggagttctgaatgcatcaatgtgcaaaagacagtatattttcatggaaaataatcacaaacaacaaacttagagtaaaattatgcatgaatgttgcttttattcaaatataatttttaagctcaattgtcagtattttctcaaacatgacacaacactgcaatgggacaatctctaagttaagacttgtaaacttcaactttatagaagtacttttagaaaattctgtgacgtgggatgtctttctgtatgttttgaatatgtgttgctctgattggttgatgaaaaataaagctgcgttggcctaggacaaggaaggatagagccagacaggaaatccaagcagagatacaggagttgaaaggtagcatctgggagacatcagcagtcatcaaggaacaacatgcaagagcaccacctgtaaaaccacaggccatgcgacaatacacagattaatagaaatgggttaatttaaatataggagctagctagtattaagcctgagccattggccaaatatttataattaatatataattctctgagtgattatttaggaatgggtatggggctgagcaggacaaaaaaaagcctttggttacagttctgatgtattgcttaccaaagtttatgttattatacctagaataattctatctgttgccaatggtttagaacataacctctggcttcttttggcacatggcagttaaaagagcaatctttctgtatttatatgacagaggagacacaatacattatgcacaaataacagtgtgcaaaatataatccatccacacccatattcaaagggcgtttcctaaaattcctgtcagtgctgattttttaatcacgctgtttatgctttaaatgcatttatatcccctcttgttgcaattattccccttatcacatccttccctctagtaaacaactacctttgggatgagatatttttgttaaaatgctacttatactgaccttcctgaaagttataaaggtttatgtgggataggttgtattagatccacttttctccttgcttttgatcaataaaattaagaaagctctccccaagaattttgataatcctttgtatctattggatctagtattattgccaatacaatgtttttttatttggttaaaccaggaatagttgctggaatacaaagatagttctcaaagtgccctgtataattcataatatgactaataatatagcaaaaatattagcagacattaatcaaaagatgggtaaattgaagatcacaattttacaaaatagaactactatagttgttactcaaatataatcttagttttcaacaatttcctgggatatcttgctttaatatgtaagatttttcccatactactggtaggcaaattaatgatttgcatagagagacacacaaattctctcaaggaacttttgaatgggcattatggctaaattgtctttctcctttccttggtcctctgttatctattataattctcttacgcttgactatgttaattagattagccataaagtcaaggaattcattcatggccactattacagacactacctcttccttaaaaaattagaaatggggagatgctgaaggatgtgaagtccatgtgcttacagaaagaattagagaaaccagaattattaaacaggctttttgcttcaatgaaagaagttgacacctgtttaccaggaaggatggagtggacactgtttattattaacctggtaatcttttgctattctgtggatccagccctcactctaatccttcagactcatgagcaccattactgactcaatagaagctatctatggtaaagaaaccacacatactctacaaaagacatgtactttataagggacttacaatgtagtcatgcctttggctttattgtgataattatcctgagaaaacttttcccaaagttttattgtcttaaaatgtgtaaaataaataaataagccacttggtgtcagaacccagaagttagagccagcctggctaagtaaggctgaaccaagattccttcttatttcatgaggatgatttccctcccaaccatgatacctacagggatcccacctcaaagatttattcctaaattttctgttacttctgctaactataatatataacacaatataatttctttttgcagaaggatgggtcagaagttaccaagcattgagttggtcttatacatactggatttgaactcatgctgtctgtattctaggcaagttttggatttgcaatcctctaacctcagcctcccagagacctgggattacatatgtgcatcaccaggcacagcacaactattatgctatattgatgttttattctgtaactttgttcaatttaccaattataacaggttcttgtagtgtctttaagattagaggtaaatgaccatgtagtcttagttacagtgtctattgctgtgaagagacaccatgatcatggcaactcttataaaggaaaacatttaatgggcctgtcttagagtatagaagtttagtcccttttgttatggcaggaatcatagcaatatacaagtagatatagtactggagaattagctgagagctctaacccaggatcagcagacagcaggaagagagagtgacactgggcctgacttgcccatctaaaacctaaaatcccacccatacttcctccatcaaggatacatccactccaacaagtccacatctcccaatggtgtcaactctatgagcctatgtgggccattttctttcaagctaccactcatgccatttacagaaacaatcttagttcacttctaattaataaattgcttttgctttttctaagatctgatctttacatatagcctaggtatatctcaaacacactatgtttgaaatgatcttgaatttctgagtctcctgccttcatctcctaaattctggaattaaagactgatagctgggaaaccagcacaggattgatccaaaccccaggaatgtggatgtcagtgaggagacctcggaaatccatgggacctccttaccagatcagtacttatccctagcataggtgtggactttgggagctcacaccatatagagggatactccctgagccaagacacatgggggtgggcctaggccctatcccaaaggatatgacagactctgaagacgccctatggaaggccttaccctccctggggagcaaaagggtatgtgaaaggtagagatttagttggggggtggtaggggagaaggtcagggagagggaactgggattgacatgtaaaacaatcttgtttctaattcaaataaaaatggaaaaaatatgcaccatcacaacccttactctgttgacagcagagatcattgctgtgtgataacacacatctggttagtacctgctttatttaaaaatgatccattttgaaaggtagaaaatcagtaacaagtgaaactatagaaataacacaatgtattaaaatggttgctcacagaccatcagcatatcattttataaagtaaaacaaatagatggactctaaaatgggaaacagtgatccctgcctcctagcacccaggttcctctctgtgtggaataaatttattcaggctcttctaaaagaaataatacactgaaaatagtagtacactattattttattagacaacactgtgactcttaggtgtttgcatttactcattttgtatccttcacctgaaaaaaactaagtacctatttaagaagcaatactgtaggaaggcacaaaacaatggacagggaactccagaagattgaacttgtaaatgggaccctgctctcagttagaaccttcataatagaggcagcaccagtcaataaatgctttggattgttggaagagaagaagtctccagaagccctgattcatcaaggggaaatggactggacctcaagagcaactgcaactacagacactgagataaattgcaagaacaccttgacttgctgagttgtaggataataactttttaaacagttgaacattaacaaacagtagaagaagatgacgcatctctggacgttataggctatggttttgattctcaaaagcatttctccttcccacaacacaagtatcctatagtgccacagattatttaaatgacctaaactcaaatgacatttaaatccactagaacagtactcaaataggtagcctaagtcagaagcagcctttaaaagcaaatgtgaaagggttcaaaatattgaatggaaattcaatatttatttctttattattggtttattttggaaattagaatacagtttgaccaggtgatttgtttccatgcaaactactagaaacaccgatcagctagttttcttaggtctaaactatattatggtaatatatgctgtggctattgcaaggatttgttatattattccttttgtttaatgcatggatttttcttttctttgaatttacatagtatatgttagaatggattaatatgtccttgggattgtaattatcatagtttaatagaaaattagctgagcttaatatagtgttatactttataccaaataatgttatctgataatgctatctgcagacaaaaatgcaagcctaatgtctctaggaaaggatagaattacaaatgctttaatgcattcagccttcacttgcacatcgacttcattttgtcttttaattactctgtgtctcagccagtttataagacatgtcaaagtctttgtgtgattccccttgaagatgcctttaaggttattctgctcactgttctgaatccaattctccaagacaggaaaattagaaataaagagatagttcagttttatatgcatataaaatggagagattaaatctaaaaataagacactataggatagtgttgacaacagaaactcttggacagagggatcaagggaatcttgtctagcttagaacaagaggaccagagggaataaaaaatttgttacctcttcccaaagtgtcatttcacagtgtccttggctgaaattgtagagtttggatccaaaagaaaaaaacaagttaggaagtataattaaactttgttgataaaaggtagtgtcagaggaaaatgagctggagtagaacctactcaaacattccaactctataagaataatatgattaagagacaagatgaagagccacatggataacttcaatgttcactgctggaaatggggaagtgtcaccaagaaatctgtgaaggaatactgagaactgacagacctggctactaccccaatgacagaggaatttggaaactacagaagtatagtctaccattgacaatttctggctctcagatgaggttgcaaagagcaggcaatagcatccaggtgaggatggaaaacagcatccaaccaggggtgagaaacagcatccatctagggatgggaaacaacatgcatgcaaggatgggaaactgatgggagatttccttctgtatatatgtctctttataggttgatgaataaaacactgattgtccaatagccaagaagaaagtacagacaggacttccagactaggagaatgctggggagaggaagtagagaggaaaccacaagagagatagcatgtagctaccaggatataagacactgggcattcccaggtaagataaggccatgtagaaatatataggtcaataattattagtcaatagttaaaagagaggctgtgatctccaccctctgcttgaggtgagttccaaccacaggcccacttacagaaacaaccctccctctccccaccatccataaaatttttatgatgcccaaaccctccttctatggttttctaacatcctgcttaaactaacacctggctcttggcctcttctccccctcccctttaccccacactactgactatatgagctagcctggaaaaaataaaatttgtcacttgatcagaatcctgtcttgtggtcattctctctgcatctcttatccccattcatctccctggatatcttgccttaggttgctgtctcacgggttggtacaactatatgtacctacttgaagaacagatttgaagacaatagtataagaacacactcaacaacagacagaccaatatatgacaccaccagaatctatggattccacaacagcaagacctgaacatcccaacgcagatgaaccagaaaagaaagactttaaaaacaactttatgatgatattggagaccatcaaagtggaaacaagaaaatcccttaaagaaatggaagaaaaaacaaacaaaaatacagaaaatgtaggaaaagacaaatcaaaaaaattcaagaaataaacaaatcccctaaagaatgcaaagaaagccaagaaaaacaaccaaacaagtgaaggaaacaattcaaacagttcaaggcttgaaagctgaaataaaagcaataaagaaaacacagaattaagggattctggaaataaaaaagctggctaaacaatcaagaactaccgatgtaaccataaccaatagactacaagagacagaagagagaatctcaggtattgaagactcactagaggaaatacagtccttgaccaaagaaaatctcaagtccctaaaacaaaattccaggaaatatgggacaccgtgaaaagggcaacctaagaataatagacacaggagatgatgaagaaatacagctcaaagttacagaaaacatattcaacaaaatcatacaagaaaacttccccaataaaaagaaggataagcctatgaaagtacaagaagcttacagaacaccaaatagactggaccacaaaaagaagtccccttgccatagaataatcaaaacaccaaacttacagaataaagaaaagaatattaagagtagcaaaagaaaaaaaaggcaagggacatataaaggaagaactatctgaattacaaacaacttttcaatggaaattttgaaagccagaaggccctggagagatgttctacaaatgctaaggaaacatggatgccagtctagactacagcaccctgaaaagttttcaatccctatagatggagaaaacaagatatttcataacaaaaccagatttaaactatacatatccacaaatctagccctacagaaagtactggaagaaaaactcatacccaaggaagataattacaatcacaaaaacataggcgatagataatcccaatttaccaaacacaaaaagaaaaaggggggatatccatgcaaaataccaccaccaacaacaaatccaaaacaaacaagaatcaacaatcaatggtcatcaatatctctcaatgtcaatggtattaacttgcctataaaaagacacagactaaaagaatggatataaagacagaatccaaccttctgctgcatacaagaaatacatctcaaattcaaagacagacatgaccttggagtaaaggactgggaaaagattttccaattaaagggacccaagaaacaagctggtatagcaatcctaatatctaacaaattagacttcaaattaaaaacaatcaaaagagatgaagatcacttgatattcatcacaggaaaattctatcatgatgaagtcataattctgaacatctacgccccaaataccaaggcacccatatttgtaaaagaaacattactaaagctcaaatcacacataaagcctcacacacttatagtgggagacttcaacaccccactctcaccactagacaggaccaccagatagaaagttaacaaggaaacaaagcaactaacagaaattatgacacaattgggattcacagaaatccatagaacattccatctaaacacaaaaagatacctttgtctcagcaccacagggaaattctctaaaatttgaccacatatttggcaacgtatcaaacctcaacagataaaaaattagaaaaggcctctgaatcctatctaatcacaatggtttaaagttagaattcaacaacacaaatagcagaaaccctacaaactcatggaaattgaacaacgcacaactgcaccattcctaagtaaaggaagaaaacaaaagaacttaaagacttcttagaattcaacaggaaagaatgaatgcacaacatacccaaacttatagaacactttgaaagcagtgctaagaggaaagttcatagaactaagtgcccacatgaagaaacttgagaacagtcacactagagaattaacagcacaagtgaaaggtctagaacaaaaaggagcaaacttatcccagaggagtggatgccaggaaataatcatattgagggctgaaatcaataaagtagaaacaaagaaaacaatacaaagaatcaacaaaacaaaaagttggttcttcgagaatatcaacaacatagacaagcctttatccaaactaataagcagagtgagaacatgaaaatcaacaaaatcagaaatgaaaaggggaacataacaacagatactgaggaaatgcagagaatcatcaggtcatactttgaaaacctgtactccacaaaattcaagatttaaagaaaatgggcaattttctggaaagatatcacttaccaaaattaaatcaagaacatataatcaatttaaataaacatataacccataacgaaatagaagcaatcatcaaaagtctccctaccaaaataaatcccagggccagatggtttcagtgcagaattctaccagaaattcagagaagagttaataccagtactcctcaaattgatccacacaatagaagcagaaggaacattgtcaaactctttctacaacgctacaattaccttggtacccaagccacacaaagacacaagaaagagaactacaaaccaatatccctcatgaacactgactcaaaactacttatggaaattttcggggatccacagggaagtgaatccaactaagattctaggcagtagtggagaggctgcctttgatgtccttcccccataatgagattgatgactaccttggttgccatactagagccttcatccagtagctgatcaaagaagaagcaggcacccacagctaagcactgagccatactcctagaatccagttgtagagaaggagaagggatgagcaaaggagacaagaccatgcttggtaaacccaaagaaacagttgacctgacctagtgaggacacagagatcctagatgtaaagctggggaaccagcctgggaagtaacaaaccctcttaaaatgagtgccagctaggaggcctaggaagtctatgggacctctaacagtggagccagtgttattactagtgcacaaatggactttgggagcccattcactatggaggggtactattgcagccagatacatgaaggagggcctaggccctccccccaaatgatgtgttatactttgatgatcccccatggaaggcctcactatccttggggagtggcttaggggtgggttgggggcattggtggggagcatgggaggatgagagggcaagggaatgagaggattgatgtgtaatatgatattgtttctaaaataaaaaaaattcttaatataaatttgtcacaggagaggctcaaaaggcacagacagattaatttctacaaaacttgaaaggttgtgagtaaatgagaactaaagggaaattgaggcaaaaaaggaactttaaatattatagatgggaagaatgaaaaaatgagaactcacatcttcctttttacagtcatgtgtacttgtaaaataggtattttctgactaaaaggaactttcaaattgaaaatcctctagtctgtaaagtaccatgtaatattagactgtcagtgaacatccttatcataattgtctgtggctgaagaagaattcagaatgtcgcagaaataatttttaaatatgtctgttagtgcactgtgaactgcagtcacttgcaaagtcaggctccatagtgaaggtactgcagaccttctgacttctactgatagggagattgggtgttgtaagtagagacaaaattatcttgtgtcatcttaatgtgctgccattctcctgttaggcaaactcaaaaggtatagctaatatcagcaaatatttagcttctactggatatcagtcaaaaaggctgcaagataagatacaaagatttccccaccatgctgtgcccttcttatgttatactcctgccaacaatacattctttttgtttggtagggtaattctgttttttcttcttgtttttttttttttttttgatttttcagagggatatgactgcactgtgctgattggaaatcactaaatttataatataaacaataaccttgcaagtagtctgaaagatgattgtgacttcctcttatgaaagactcaaattgagctcaaaactaaaaatacatggtttcaggtttaagaaaaatttcagagatcacaagtagaaaggtagaaatgaagtctgcactctagctgattttgattttcaatgtgtgatgctttttatttgcaaattctttacaatggaaataaattttcaggacaaacatcatcacaaaactgagagttcagatccccaaggaaagccaaggagtaacaaaaatggaaaaatggaaaatttcagtgtacatgatgatttgcaagcatctggcacaacagtaagtgagggataaaacataaaacaataagagtttgatatttgcatatactgtgtagagtaaagggtcatgggttttagcgtggtctatggcaggtcccaatgtgtccccaccagctccttcttgtttccagatgtatcatttccagagtgttccaaaataaatcaataaaaatataaataaataagctcaatggtcactaagcctccaggcattttggatcaaaacccaagaagatatcatcttgctcattaggaaaggccaaaactattggaaacaagtgttggtaaaggtgtgaaggagaggaaaaccttcatgttagatgtagactaagctaatacagtcatcatggcaaacaggagaaatgtctccgcaatttaccagacttataactgcaatatgataatatctgtgagtgtgagtgtgtgtgcgtgtgcgtgtgcgtgtgcgtgtgtatgtgtgtgtgcttgtatgtagacgggttatctgtattctcacatttgttgcatcactggtattgaaagaatccaagattcagatccaatctacttgcctagtaaagatagctgaatagaggtgtgatgtttacaaacacagtgttgctatccatacttgaaaatgagaaagaatctctgttttgacagcgcagatgacctaaaggccacacattttgaagagtaggccagacacagaaagagaactactacccaacctggtaaaatcttatccttctcaagaattctgatgcttttgatgactgttagtcttgccagctcaaagcaaaacagatttcaggaacaggtgttttagggtttatctatgtgaagataggaaagtgtaaagtatatgaaggtctgggaatgtagttacaaaggtctgaggatggaaagtcctaacacggtggataaatgcaagttatgaaggtctgagaatggaaggtataaaggtctgagaatggaaggtcgaagatggtaatgtaaggtacatgaattaaagttatgaaggtctgaggataaaaaggcttaagtgatgataaagtgagttgagacattaaaaagaatgaaatatgttcctgatttctctatttctcatgctgctgttaatagtcagtaaagttctacaataccactatatgatcataactactgggccaagattaagatgcttttcattgtccaaaaaaaaaaatctgtcaattttaaaatgttagttctttcagccaaggtacttctaacatgaatatgctgctaatgtgtctaatacttatgtttccataaactctaaggattcttgtaagttccaagaagctgaattggatccaaacaaacagatcagattcactccaaataaatattattcaatctttccctggtcccaggactcccttccctcatgttgggacccctttaggaaaccctccctcatctcacaatcttcccctcaagtgccaggacctaagaaattatttttttctaaacttaaccttgtcttctgctctgccaacatcttgccaggtctaagaggctcctaagggagttccatacagcctggactgtgatgaaacaaccagctaccccaggacgtggcagcaccccaaccttctcaggtcccccaaagatggtcaaagcccccccacgacagcagaaagcagtcttgagaatttgacatacttattccttaatctgccatgtctaacaacccatctttttaaaaaaataataagtaaaggtaggattgaaaggttcaggcattatgctggcctgcccctgttacctggcagaatccactcagggggaatcctgggaggcccagggttccatgggaaataagtctgcacacaggtgcaaaggacccctttaaaagacagacccctgcccatttatgctctctctattttctctactcctctctctacttcctcctcctctactcttctctctctttctctctttctggcgaccagccatggtggtcagccattaaccctgtttctcttctttcttactctctctactctgccgggcctataataaactggttaatatgtctaatagtctcatgtctcatcttgcactgccttttctttatatctaatttaaacaaaagtctaacaagatcttcagttgatcaacctaagcaaattatttcagttcaaataatagcaaaattcatagagtagatagattaaaccacaggtatttctttcaaactgtgtcatagatggaagtctcatatcagggtgccagcaagggtgagttctggtgagagccctctccatgacttcaagacagtcatcaaagtcaagacagtcatcctttctttgtgtgcacatgttgttgagagaaagaactcctctgaagtcttctgacaagttaagaagtcctggggacccctaccctcatggcctcacataatctcaaggatcactctaagttcacccttttaaaacatcactttgagggttaggatttcaacataagatttttgtgggaaggaacataaatagtgctcagtgtaggtacacacacacacaatacatatatatatatatagatagatagatagatagatagatatagatatagatatagatatagatatagatatagatatggatatagatatagatatagatatgtctgtatatatatgaatgttttgaataataatacatatattttatgtatacatatatgagagtcatgtgtttatttggctttataaagttcagcctaaacatttataagtacataaatgaacaaaactggatggcagtaatagacacaagttgagagtccctggaaattcacaagaaacaatctggaggcttcagagtgttgtgggcatctcctcacctgcacaaagatgaagtgtaattgacacaacttcttgtaaggagtgaaagaatctagaaaatgttgaataagctttacaacccacagaatatgtgatagatgtaatctgcttagctggtatcactgtatctggtacaattgttgacatagttagaatctgcagtcaatttgacacaaacagtgagtcacttgggaagagggaaactcaagtgaaaaatcacccagtttagactgatttgtgagcatgtctgtgtagcattgctaaatggtaattcgtttgggttggcccagcccattgtgggtggtaccaacccctaagtagagaggcctgcataataatgtagaaaatgcaagaaaatgcaaccatgttcattgcagcattttttttattttaattttagaagcattcttatttacatatcaattcccccattcccttgtcttcccatcctcccatgcccccccccaaacccccaccccaccccacacacactcctcagggatagtaaggtcttccatgggaggggggacaatcaaagtctgtcacatcatttgggggaagacccaggtccttctccccatatctgggctgcaatagtatccttccacaggaaatgggctcccaaagtctagggataaacactggctccactgttagaggtcacatagactgtcttggactcctgaacccacattcagaggccttggttcattccaatgctggttccccaggtcttagactggtgtctctgtgctctcactaggtcaggtcaacagtttctgtgggtttttccagcaccctattggttcctttattcatccctcctctctttccacaactggattccaggagtatggctcagtgcttatctgtgtgtgcctgtttctgcttccataagctaccaaatgaaggctctaggaatggcaaccaaggtagtcatcaatctcattatggaggaagggcatcagtggcagcctctccaccactgcctagattcattgttggggtcatccctgtgggtcccctaacatttcccttgtgccagacttctctctaaagctatactggctctttctatcaaggcatttctttcttgctctcctctatccctcccctgtctcagtcctcctgttctcctccaccctccccttttcccttctccccttcccacctccctcacccccacccatgttcccaatttgctctggggttcttgtctccctccccttcttcaggggaccatgtgctcttctcttggggtcctccttgtttcctagtttctctggtggtgtagattgtaggctagcagtcttttgctctatgtctaatatccatatatgagtgagtacataccttgcctgtctttctgttattgggttacctcactcaggatgtttttttcttccagtttcatccatttgcctgcaaatttcaagatttaattgtttttttccactgagtaatactccatgtcgttcattacagctttattcagaatagctaaaagctggaaacaatctagatgtccctcaatggagactagataaagaaaatgtagtacatttatgcaatgtagtatcactcagctgttaaaaaattgacatcatgaaatttgaaggcaaatggataaaagtagaaaaaataaccccaactgacatcacccagacccagaaatacaaatattatatgtactcacttataagtaggtattagctgttaagtaaaggataatcatgctacaatccacagacccagagaggctaagtaacacaagggctcaaggtaggacacatgggtttccctgggaaggggaaatcaaatagattttgtgggtggactgagagtgggtagatatgggaacaagagaggttaagcagtggttggggagaagggagagaaaggactaggagagatgactggaactgggggatatttggagattatgggactatgcagaaactcaatgcaagggaaattccctagaatctaagagagtgaccttagagaagtctcctagtagtggggatacagagccctaacagttcatgttccatgtaaggtagctggactgggccatcaacccagccataaagccttcaacctacaatctgtcctgcctgcaatatggagctagtgcaatggtggaacagaacttgtgggagtggccaacccatgactggtccaacttgaggccatgaaattagaaagagcccatgcccaatactgcctctatggccaagaaccagaagctggaaagcccagagacccaggatagatagaaccaaacaggactgggaaaacaaactcatagtggatagcctaattgtcaccagagaaatagcatccatcaactgatgggagcagatgtagagacccagagtcagacaagaagcagagccatggaaacctgacatgaattataagagccagaggggacaagagtaccatgagaatatggcccatagaatcagctaagcaggcttcatagggtcacagagactgaagcaacaaacacagaccctgtatgggtctgagctaggtcctctgcatgtaccttatggttgtgtagcttggtgttcttttgggacacccaaccatgggacacttttcatcctactgagttgctacatccagctgtgagtttgtgcccagcctgccccccccctttttttctgtttttatttttttgtagggaaatggaggaaagaggaagaagtgatctgggggacaggggagatgagggaacaactgagaggagagaggaagcagaaactgttagccaaacagaatgtatgtgagaagaataaaagttaaaaaaagagagaaaagggggagaaagaaagagagggaggggaggagtaagggaggaaggaaagaaggaaggaaggaggaaggaaggaaggaaggaaggaaggaaggaagtcatgccacatgggggcaagccataagccgtgccactgcctggtttgtgtcttcaggttcctgccttgagctcctgccccagctttgctggatgatgaactataagtagtaaattaaaattaaccctttcctcccccaaatagtttttggtcatagtgtttctcccagcataaaaaaaaaaaaaaaaggaagaaaaaaagaaaaaagtacacttgaacaactactctggagctatcttctgtctgctgcttttgatcacagtgaacttcagatgctcactttagcaaccgtctaaggagccacttgccttaaactccatgtgtacattacttttcacagtattcagcagagacaggtatttctgagagtttcactagaatgttttatttctgatacaaaattacaaacattaaaacagcaatcaaattctagtttctttacaacaatctggtagccaaatttaattttttcccattttttaaaatttgaattagagccgggcgttggtggtgcacgcctttaatcccagcactcgggaggcataggcaggcggatctctgtgagttcgagaccagcctggtctccagagcgagtgcaggataggctccaaagctacacagagaaaccctgtcttgaaaaaccaaaataaataaataaataaataaataaataaataaaatttgaattagaaacgattgttttatatgtcaatcccagttccctctccctcccctactcccctaccacccccaactaaaactctacctatcacataacctttctgctccccagggagggtgaggatttccatagggggtcttcagggtctgtcatatcctttgggatagggcttaggcccacccctgtgtgttgtggctcagggagtattcctctatgtggaatgggctcccaaagtgcacacctatgcttgggataagtactgatctactacaggaggccccatggatttctgaggtctcctcactgacacccacgttcctggggtctgtctccaaatttaaattttaatgactttttagtctctctctctctctctctctctctctctctctctctctctctctctctctctctctgtgtgtgtgtgtgtgtgtgtgtgtgtgtgtgtgtgtgtgcctatgagtgttttgtaagtggagtgggagtgagtgggagttagtacatatgtatgtatgtgagtgtgtgtaggagtatgtttgtgcaatggcctaaaaagggcatgtggtcttccggagatgaaatcacaggccactgtaagccaccttacatgggaactgggacctggactgcagccctttggaagagcaccaagtactcttagctgtggatatatctctccaaatttggttttaattgtgcttacatcttgctcttccttgtacataattatatttacctgacttaacatttcctccatttttgtcaaagtgctttttctatagagttccgagtgaatcctcatgctctattagagacttgcgttgttaacacacacttgactcaagtctgtcccagatattggtcctgtacctttgtcgtttcaaatactggcttcccctctttctctttagaattcagacattgttgttgatgagatatgtgtgctctcgtacagcttcatcagcaaaggtccacattttaatatcatttaagtttatgaaaggaagagctactgaagcccattcatgataatttctttttacagtataagaatctgaattggactttatattaaatacagttgttaaaaactgcagatttgtgaggcaaatgaaagccataagtttagcctggagcagagctgccaggcaagccaggggaaagtggctcctatggacatttgcctttaggcaaagtcttttgttagagctcctgaactagcagctgaatagcccacaggctctgagagccactgcaaaagagaccaaggtttgactgcttaacccatcttctctacaacttccctcttgaattgggtgagctaaaataaagttatagccttgagaaagaaaaatgttcgcattctaccactttcaactttagaaactccaaaccagcaccaacttgttgcaaaggttttcattggaagtgaagggggaaaatcaatactctggttcctgtgatcctccatgattgtagtaacattgcattcacttgcctcatgatgaataaaaccatcattgcagcagggcaggccagagatcttgtgaatcaaattatgacataaatgcaaaaaatgaattttaaccttgtttcacatttcatttgtcctagagaacatagaaaatctgaaacatgttcatgattcctgtcttcccagaaaagaacagaatgtggcatcacactgctgaggagaatagtaagactggactaaatagtaagactggactgaagctcatacaaggacatcctgtgcttttagcattgtatttgttatctaaggtgtgttttggttgctctgcattccagttgtagaaaacactgctaaaaagggatagaaacaataattaacagatataatttacaataaaatacaatacaattctgatgcagtggctaaagggaaataaagaggccaatagtataaaacctgctgaatccatttactgttgcttatgtgtatatatttcagagctgaccgctaggtattgaataaccaactagggagatcatccccagggaagactaattctccctctcttagccttcatatagttgcctgtagctctttatctaggtgcgaatccccatgaaatttcctcttccaccttagtaggtctaaaggggctgtcattgttcaggtcttcttttaggcagccatactattgaggtatcatggttgtagctttcctattgtttctaggagacacaatctcatgaaagacttcatggtcctctcattcttacagtcttttcatcttctctctattgatattccctgagccttaggggcaaggattgtgttgcagatgtatttcctggagctgggtatagcaaaattggttgatccccgaattttgatgagttgcagttttccgtgaaactctcagtgtgttgcaaaaatgaaaccactttgatgaggggtgaaagctacacttacctgtgtgtataagggcaagtgctagattacaagttaaggaaatatgctggctgagtaaagtggtaatctagaggtagatctcctctaagatatgcaacattattagccttgtgttcttgactagatttctaatactggacacaatttctttcttgttgagctggcctcaaatccaattagacggctatttattcttgccaagttatgaataccaccattggacctttagagatatctttccttggccgtcattgttgtagattctaggcaacaagactgggtaggactgttgatctcttcctctctcggcatcttgcatagcaatttctggtactataaaaactagacaccagggaggaagcttccagatcagatccagcacacatttgagtcatgtgtctggtgatgtcatcagtagtacttaccttcaacttctgggagacaaccaagagcaagagcaatagcctatgttgctttcagtgtctcttggacatccagtcactgaaaaggtttctcatgtctgatactagttttttgttcctcatatgtaacttcatatatgtagtccttctgcatcctatttctctgtagctcaagtcagtgtgtgtgtgtgtgtgtggtgtgcatgtgtaattttacgtaaaattaaataatattccttaaggcatctttgtcattgattgtctcatcctctccctctgtattgacctcccttcccctttccattttttccattcttcccattcatatcacctgtatcttgttattctcctttcttggccccctcatggtcaaagaatgaatttaattaatgaagaataagtataaggaggaccaagcaggcagagatggagacacacacacctggccagagccatttgccctgggcagggaagagaaaccacagcacacctgaggccacctaggtagtcaagtgccattatagtgaccaaatatattgtggggtatgggagagaagggaagaggcagaatggttcatttcctatggagagagacaaatctgaagaggtaaaggtggcgaggaatgggctcatgtggaaggcctacttaccagggcctgtgttaatgtccatggtcccttttgccaccaaaggtcacacagatgcctagatttctcagctgccacctatagccatattaggaaccaagggacttgctgcagccaggaccatgaagatctgagtggcctgcactgccacctatggttattgggtcaaccaggcccaaccaagctgctgccaagggccacatctgggtccatggccctcctgcagccagggcctgtgttgatgcccgtggctctggtaactacctggggtctagaacaacacctaaggctgtgttggtgcctgagggtcatgctgcaaccagcaccatgttaacatctgcccaagctggggggcagtgagcccacaggaaaactagcctaccgcccccctgagagctcccactttgagaaagctggtcccacccctcacctgagtgagcagaggtcccagcagcctattcagaacaatccagctactacccagacacacatacagggcactgggtgggcactccctaacatcgtcacattctatgacctgttggagtgcttaaagggactgatcctgtagaaacatagatgcaggatctccatgactacaggatatctgagagtagtttcagtgagggtccagtattgatggtgtcccagaagccagagtccttgaacctgaccaacaacacattacacaatgaacatttgcaagcaaagctgtgtgggcaaatataatggatgatacacagcagctcctactactgctaagacaaatgatgaggtaatagagagacagaaaaggaggagggaaacagtttggtggagttcttggtttttagattatttgccttttattttatttatttttaacttttatcttaagtttattttttttccattttccttttgtgtaaggatactacaagtttgaagggcagatacagagggactgggaagtaattgggttagggtgcatgatgtgaaattcccaaagaatcaattaaaagatatgttaataataaaaataagtataagaagaaaataaaattctctagcaaatatcaattttagagtattcaagactacataaccaatgctaaccacttttaagtactattttaatcattacacttgcaattgatgaattttgaaatgagaattttacattccattcaataaaattaaatctttgtttctatataaatgagggaagttgaatattctgcatccaaagtaaatgtctaccaatgcattgacttgatgtttttacttcagtgattattggcaagtgttcagcaccctcagagaaaatagcacatattatgacctgaggtaaaaaagagtaagcattaggaaaaggaagaaatcaaacgatatatattttgtgataaatccttcctattttgtgcatacaattaaaataaaaagtcagcatccttagaaacagatacagaggccttaactccttgaaacacaacattaagcctgctctggctggattccatagttgctagctccatgagcaggctgccttcataggattctgttgtacaaattcactctggttttaatgctctgttgtcatgtttcattttaaatggttttttaacacctcactcattttcactgggtaccacaaaccttgaagggaatcccatctccaggatcagtatgtgctgtggagagccagctagagggcatagaatcttctaaaacctgcttaagtggtccatgaagcatcactgagtagccacaaaatcccacctagcttaaggagaggggaattagtctaagtttctagagagtggggatatttttatagtcattatttgacacacattttgaaaatattcaaatatatagtgcattaattaccataactaagtctattcctcacaactcaagcaatggtaagaaatactgcatacagcagaaagtaggaaaggtagaggctttgcagccagataacttgatttgaatccagttgttgctgagatcagtgctgtgataattttcatagctgaattccttaactgtgaaacgatattaaatatagaaattacctgtcatgattattcatgaaagaattaaacatttgtgcatttaagactataacccattagtattttattatctgattaagttaacaaaatcttagagtgaagatataatgaaaaaaattagacatatattattgctttgcagtcccaatagcatgaacgccattcttggattcataatgataattacattagcattacagagaagagtgtattagtttgccagaactgctacaaattctatggcttacccagcacacatttattttcatgttctggaggcaaaagtctgaattacagtcagcagggtggctccttctgtgggctctgagggatggatctgttccaccctctctccttggcttacaaatggctgaattttcccaggggcattatattgtcttttttctatgtgcatttgcgtccagaatttttctttttaaaaggaagcagtcctttagaaagaaggcacacctgaatgacctcactttaacttaatcatctctaaaaaaaatcccaactgcagttctctttttacctcagtagatttccatcaaactacatgaggtctctgctgcccacccacaaagcaagcctatattcctaaactgaggtcccaatgaggccaaactccaaggaccctcctccaggctagcagtatattctgggggatgctgagcaggtggggttttggggaggcatggcccaccttgagaaatggagctggccaccacccccaagtgctcatgggaagtatcaaccccaggctggttgttgttacaaatctctttcaaatgtattcttttgatgacaaaaatgaaggagctttgtaaattctttttaattaagaatcatgttgattcagcctcaggaatttcttcagcctatgggcccttagcctgcgacaggtacctgaggagctacaggttaggccaagaatatccagaggtgtactgagtaccttggcaaatgcaacagtggtagttgggatttctcaggctgggaaagactccctccacgatggcagtggtgatggaggtgggaccttctagggaggtatgcaattatttggaacagagatcatttgcagctgtctgtgaaagctactggacctctaattgctacttcttcaggaccattcttcctctagtcatgcaggctattccacccatgcacaacttcttgtgcagtgcccctggggtcagacacatctcaattttgtctggcttgtgccttggaacctcccccacagttagcagaagtcatctgccagtactcaacagttttttttccacagacagtgtgagcagcttactatacacaacagcttccctttttatctccccttcccagagttaattttttccatgcttttgttagaagagaaatttagaagatacaggcacaaattaaacagattttattttctgtctgatggtaataggtcttgaggagaaaaattaagcaaaagtggataaaggtgaggaagacgctgagacaagatgatatttgagggaagtaaataacaaaggggtgaggaagacgctgagacaagatgatatttgagggaagtaaataacaaaggggtgaggaagacgctgagacaagatgatatttgagggaagtaaataacaaaggggtaagagaaacaatgagtatgtcaatgacaacagcatgaaatctatgagaaatgtccatggggagagcttgtggtttatcctgaggtaggaaataattattaggtcaagggcaacagcatagcatctgtaagagaaatatccatgaagagtttgtaatctatactgagatagcattatcgttagtatcctagaggatgtccttgtgcaagtggtgggtagataagaatgaaaatgatgagaacataaagccaacagcaaggaaataatgtgacttgtaaaccaccatgtatgatttctcatgtccctgttgaaaacagaacctcagaattcagaacaaagaaaggtgtaaggagagaagtggagaaggttaggaaggtctaaacataaactgagagtgtggtaaaagtaatggataagaggctataaagataattttctgagagtgcagtaacaataacataggcagggtggttaggtatggagtgttagcaatggctagatcctcagacaaacaggatttttcttaattttaaatttcaatgttttgataacttcaaatttgaatactcatttccagctctgcctctttgtcctctaactgattctgtgtcctccaactccttcttaagctcatggtctcttctgtggttcctttcctctacacacacacacacacacacacacacacacacacacacacacacacacacacacacacacacacacacacacacacacacacacacactgagcccatatagtgctgatcttatgtacaggtgtttaggaatgatcacttacttgggtttgagtaatctatcagtggctccttcctttagaagactgcttttccttttctcagtggccattgattgactgtagctcttcatctagggaatctctcctatctgtaattttgaacataatgtttcataacatctatccacttgactcattcggtagagtttgggcatcctttttatcaagtttgtcatatctatgactctgtcttgtaacaaacctttacagtattctgtaattttggattgtgtgctttctttcatagaattttatgttaagactcattcagccaaaactcatgaacctttctattatctcacacttgccactgctctttaggcaaatgtttcttttcatttcttgctataggaattagaacattatttggttaaagcaaactgaatccaaatgaagcagaaacaagcaaaataaacagtagatgctaatagacaaatatatcaggaagtttctaatatgcatcccatgtttctaatagattcagtaggctttggaggccaacatcagggaacgatcaagttatcaatttcacattatcaacaccagtaaaacattgcatatgttttgatccaaataaagaaaattagtcatagtcaccattaaggatacaaaaaatatgaattccaaactttcatagttggaattcagcatttaatttgcaaatactggtaaataaatgtaaaattctccaggcaaacaaagacatgaaaaagaatgatgtatatgggtaattgagaatctgttctatccatgaaaccagatttctggagctgagaactgacttttcattatacttattggacatcagatagatgacacggaaacaatatattctcaacaaagtagctgcagtaagtagccttgcaagtttcatgtccaggtcacaggcttatctgtgccctggcattctcaaagcagtttgtgacacattaaactctatgaaagttagaaactttcccagatttgattaagctgcagagaacacaaagcttggaaaaatataatttgatttgattttatcaatcatttttgaattgtatgcttgcttacattcagttttcaacacaaatatcaaagataatttcattccaacaagaaaaaatttttgactcactattaagaagaaccttataatttatttgcccatttaggaagccaagaatgtactatgtgagcaacaataaaaattgttacatcacatgcagcttcatttgagcttggtttatgattcagggaaacacataaagtagcaaggcaaggatgtgatttgccttatgctcaatggagtctatgtttggcacatctgtgttatatttaataaaacagtatatatttagttctatccaatagctacaattctagtattttcagtgtgttcattgtaactcaaattaacatactggagaatatatatttgaaacaagttttgattctgcatgacactaactaattatttcactgtttgtaatacttggatttgttgagatcacaaccataattaacaagattatgccataaatacagtgtagaggctaccaataaaagcatgctgacagttaaacagagtaccactgagttagtttcagaacagaaggataaaggaacattatccatgacagcccaagtaaattttaattttgttatatttactaacattttcatctccaattgagaaaatatgtattgtttcttagcttagtttctaccaaatgttatagattcttatataattttcaacttgttcatctattatttttgtcctgttagcaacaacctccttttcagtgactcttcctgtcaatgttacagatgatgctctaggttacctgacaagacagataaagactactgacttttccaaacatcatgaaacatatctggtttctaggctatcaacgtattaatcatgcaatttttgtgaatggaaaaggaggaaatatacaaagtagtcttccatatcttgtattttgcatgtgtataatttttgacacttgtagcttgtctataaagctatgctcaaatatttcgataattcaaaatatcatcacttcatatatattttaaaatttgagagtgaaaacattgctcaagcaaaacctagtttataaatctgagagtagtagctcacatctataattacagcactcaggaggtatgagaactatagccataagtttgagacaagtataggttagagtggattcctctttaaactgggctagaataagattctgcctcaaaagcaaataagtgaatattaatgagcaccacatttcagggatgaagtttttagtatttttgtgtggatatattcaatatatagaaacattaaattacattttcagatttaattctaagaattaaatattcttttcaatatttcttatagcttaaaagacaaaaaggtaacctaaaattaggttggaactatatttaataaaatgctttaatatcttggtaacaaagtaatttcttagacttatagctagaataagttctttgtcactttttccacacaattcttaacaagattgcacattggccaagatgacctttggcttcaccctgctgattgtcagtgttatctgaatcatttctataatgaagaaaaattacaatagttaaaattttcctttattatacttcagtttactttaattaataacgatttagctactaatttaaaacccagtcagctccataataattaagatgcccatggatgctgtataactatcttgctatagccaatcttttgtttcataatgattcatcttcaaattttttgttttcctctcagagaagccatctccattgcagcaataaattctaacctccaaaagcagtcattcccaagacaacactgtatttcttccacgatgtaaatgtcacatgctatagcatctagggtcaggcgttctaaaaacacagaaataccagctatatatcattttaatatgcttattgaaaattcaacattatatgaaatagaaattacttttatggaaatagaaagctttgatgaagaattgagctcaatttgaatgatgaaaagtagcaataacaagactgaagctatggcttagaaggacctgagtttagaggccaatcacccatataaaagtgaagtacactgggataggtttgtaacccagcactgtgtgaaaagacaagtgcatcctgggagcttgttggcaatcctatcagcctgaaactgcaagctccaggtccagtaagacattctgtctcacaaaacaagatagagaacaatagaggaagatactcttgtctggcctttatattagacacacacacacacacacacacacacacacacacacacacacacacacacgaggtcacaaatatcaaaggataaagaaagaaaggaaggaaggaataaaataataccaatatctaatatgctaatattcttcaatacaagtcataagaatatgactctctaagtctgaggagtcatactctagactgaaatgaagattttatgtacaatctttaaggcttgaccaaaagaaattacacggatttaactgacaggttcatgaagaaagctgctatccctacaccagactgttttcttgaaggagatgttctagcaaggaactccaggcccttggaccaagcatactcatggctattcctcatactaacctccaactggaggctgatatcaggaaataccactgaaatgcatttctagagccccagccaaggcttttgcatatctaagctacttttctcagttctggttcattacttaccactcttgttcctccctgtttccccccttcaacatcctggaatctgtaaatgagcaaagaggcaagtactggggcccctggccactaagacagtcccctctgcctaaacatgtgtcctgtctgcagcaggactggtgtttcagaggaaacaaaccacagtgaaccaatgcttatttccatgccttgcaaccctgtaacagcaggtcaataaagccctgagtcacatgacctctaatggggtgtcttaattaatcacaatgattatgaggacacaagattgttcacaatttcactttccacttagttgttttcctgctgcaataatgaatctaatgacaagtcagtagacatttgtgtaattggggaatttcctcatggaataggaaattattaaaacagagtttctttttaaattaaattaaaaacaatctgattttacacactgatccaagtcccctctcccctcctgacataaaatatcttggagtaactctaaccaaacaagtgaaagacctgtatgacacatcgttaagtctttaaagagagaaattaaagaagatatcagaaaatggtaagatctcccatgctcttggataggtaggatcaacatagtaaaaatggcaatcctatcaaaagcagtctacagattcaatgcaacccccatcaaaataccagcacaattcttcacagaccttgagagaacaagactcaactttatatggaaaaacaaaaaactcaggatagccaaaacaaccctgtacagtgaaggaacctctggaagcatcaccatccctgactttaagctctactatagagttatagtagtgaaaaaagcttggtaatggcacaaaaacagacaggtagaccaatgaaatctaactgaagaccccgttattgatccacatactatgaagacctgatttttgacaaagaaactaaaattatatgatgagaaaaataaagcatcttcaaccaatggtgctggcataactgtatgctgtcattagaagattgcagatagatccatatctatctccatgtacaaaacttaagacaaaatatagagtttctatggagatagagatagagatggatatatggatgaaaaggtgatagattagatagatgatgatgatagagagagatagatacatagatagatggatgatagacatgatagaatatcatgacagatagatagatagatggatagatagatagatagatagatagatagatagatagatagatagataggagagagttgttacatttcttttttaatgtgtacattagtatatttatattttctttttttgaaattacaaacaagattgaattacatgtagacacagaaatgatacctatcaaattgttatctttgaaaaggaaggaaagaaaatgatcatttatggaaacagtctttgtgatgccacaatggtgctaataatgcagtatttttgtgttcaaatttattaggtttttccattattatatattaaaatacatgatgctgcattgcttattgtcctagttacaccctaacaattaatataatgtaaatattgactcttccttcttgacattttaaacatccaattaatctctcatgagcaagaaattgttatcacccaagctacattagtaaagaggccaatatactgagcaggaaaacaaagtttcgtagtctaacagctgcttaattagggagtcgagcacttggatcaagtgaggcatggaaatggattacacagcatttccatgggcaacacattatttatcaataagggcagtaatgctactttgagggaaaactcaccaaagcttatttgaacttggagctgttcattcttctcattctttttaagtaatttacatggcaggatatgtaaccattatagcttctattaagttaaacaattcattatttccctagcagagcctaggggaacaccactcagtgaccataaaacttgattctagtaaagtttcattttcagaagcatgccattaattgcatgttttaatgaagaatctgtgaaatgctggagaaagaaggcaagtttgcagggaccactggaatctacagatgaggtgagttaaagagatgggaatgagggagatggaacatcccctaagcagcagctttattcagtgcatgcccccacaaaaaatagaagacatctacattctgttctcatctttatatcaaaataaaagagggaaaattccatatgggtagctgaactaaatatatcaatactactttcaatttcgtgaacaaataaactcttgccctataataacaatcaaaataatcacatttcagatgtgtttgtaagataacatgatcaacaaaaaagccattgttctaccatttaagaaatgtgtttgcatctgctccttgtagttgcatccagtctacaagctctctgttcctagttcatcaggaggtgccagattctctgtaccacctatgattccaattttgttttattgtgtagtactgtataaccataaactgtttcaaaaataacaaagtggatgtaatgatgtatccaaacaaaatgtaatgtgatgtgaaaaggaaatgaataaaacattttttgattcaaaaagaaaaaaaggaaatgttaggcgacatttatctaactttatgtagaggtgggggattcatctgaacaatagaagcaatgagataaaacatctttcataggtttagagacagtccagttttaccaattaagattttgctgaggtaaaacaaacaaaataaataaacataaacattactcttcaacctgaagtcctcacatatggcacatatatacaacatgtcctttgtttatcctctcattatgttaggcctccactttatttttcactttaacctatttttgaagaccttaattcatttatttcttacacaaactcacctcttttgaagtttctttcatgggtatttgtgtgtgtgtcatctgtaaatgtctttactgtcaggagtttaaagaaaaatatattgcctgtgagtataagattatattctagcagtgtagccaattcctggtaaagacataaactgaaccccccagaaaaaaaatataatccaggttaaacatccaacaaggttaattgactgctgagaacttcaatgagtatagaaaacttgaaggctacaggtctagacccaaaaaaccttctgttgtctcagccctaaatagccatgcactgcacacttctgggtgcgatttaacagtctgtgactacttaactcaaatcattttaggaatgtacaaacagacccataactttcaccaacccaaaggctaagaatgccatcagatagcatctgaggaacttaccgtagtttcctggcatcctgggacctgcttccctcatgaaaagttccctgatttaggacattctttgttctggtgtggatacatacatgtatgtatgtatgtattatgtatgtatgtatgtatcttacacctgttagccacattggagaataatatttgaggtaaccagaatctgggctatagaatatttatttatagaataaactttcttactccctttgaggtaagagcctttttttttttttttgtacaaacaattaaaactagcatttgcctctcaaaatatcacttgcaggatgtctggtgaaccaccaagattttctcttagaattaagtgtccatgggaacaataaacagcagataatgaaatgtgaataaattgtatttaagagtgcagaacagagtttaaaaggcatgcgatagcacccatcattgctatagttactaagacgcctggctcctaaagcttagaaccacttctctcgcttcaccgttaccttcggaaccctcaacccaagctgtggatactgacttcacctgaccttattctccctcacattggagcatcttccagcaaagggacgtgacacctaagaaggctcccagagttacatcttccattttataatggtgtagagggacagaaacgaaattagggaaaggacaacttaattcatcccattgcccatttcctgacggtttcctgctgtctgatcactgatggccttctagcacagttagaaagcctgggtctatcttgtagagttctctttggaagtcccaaggtgatgcccaggaatagtagttctgcttctaaggcagccgtagtagtactgtgtgaagcttatgccatttttgcccttgacaaagcttcagagtgctatctgggtttgttactagaagccgttttggaagtgaagtacatcaagtctcttcgtccttaggggtcagcccttgattccatttcaaaatagtctcactgaaagtttgtcttatttcataaggatttttcttttaaagtactctggtatagaccagagtactttattctagcagtgtagccaattcctggtaaagacataaactgaccaacagactgctgtggctctgaaaagggcagtgggtaaaagttgtgcagtgagaaacacagagccatgagtattaacagggaatttcaaggatccatttaattttccatgactgcttataatcacctacagacattgaaaatgaaggagttatgtcatttggatgtgtgtgtgtgtgtgtgtgtgtgtgtgtgtgtgtgtgtgtaaatatgtgaatctcactgcagagagacagacaagcaagagggggacagggtcatgggaaaagagggaaaaagtaaaaagaaaggtagatacacagaaagaaaaagcaagagtgaggcagaaaaacacacacagacacacatacacatgggggtggggttgcattatgtagcattaaggagtcataaaagtgatagaaccattcatggcaatggctctcaacctgtgagacatgacccctttgataaacctctatctccaaaaatgtttacattatgattcataacagcagcaatattacaattatgaagtagcaacaaaaatagccttatgatttgggatcagcatgaaatgaggaaccatattaaagggatgcagtattaggaaagttgagaaccactgatcaatgaactggtgtccaataaagatgcttttagctgagtattttcatttggagaacttaccagagtctacttcaaagttgagtgctagggtaactctcactgaatcataatgtaaattgaagacattgcaagtcagtttttcagagattgccaaatgcttcaaagaaactgaaatgaaaagtgatgggtttcaagatggatagacttatttttaatatactaaagtaggaataaaatacctgttacagagacagttaatcatctatcttaatgaaaatacttacggaaaagttgaaaatgaatggaatgtttaaattttgatcaagtatgtatgaaacatttttacaaactacaactggatatttttactttacataaaaagcaactgcatgtcttttatttgttattatatcctgtcctgctgtgcacaagaaaaaataatctctgaatttcctgtctgttcttctccccaaatttgcttcatctaaaaatctattcttggatagataaatacttactaatttacttcagccatgatctatatagacttttattccaaaaatgaagatattgtttaatttgcaaactcccttagcttcacttccctccttctagctctaataaagttatgtcattattcataactccattgtgagcagctttaactaaatttattggacaaatatagatagtataattgcagacttattttattctatcaattatgcagcctgtcatggcaggcactgttggcgggttatattgcatcaattttcctcatttctgtttacagaaatctaattgtatcttctaaaaactggggccttaatagcagacccctgtgaagttaaaggttacaagagttaaaatgtatataatccccaatagagtgtctgtatagaggaaatacctgcttgtgttcgctaatactgttggtgactcaatttctattgaaattattttggtctcagaggacgagaccaactccacagggcaaatgagagaatagcattcccctttgccaataattagctggtgaataaaatgttatgggatgtctgctttgaaagtaggactgcctctgggagtacacacagccttgtgaatgcacagccaactgcagtaaaattcaacttaaataaatgttataataggaaaatattccagatatagaaatatcttcacagggactagacagatggctcaaggttaagagcacttgctgctctttcagaaggcccgggtttggttcttagtatccacatgacagctcacaactaactgtaactccagctccagaagatctgatgtccctctcttgtctcttatactgacttgttttgtatcaccttgacacaagctagagtcatcatcgaggaaggaaccttagctgagaaaatgcttcaatgggatccagctgtaaggcattttctaaattagtgatcaatagggaaaagcccagagcatggtgggtgttgccatccctgggctggtaatcctaaattctataagaaagcagactgaggggctggagagatggctccatggttaagaacactagctggttttacagaggtcctgagttcaattcccagcaaccacatgatgactcacaaccatctgaaatgagatctggtgtcctcttcttgcctgcagggatatatgtgggcagaatactgtatacattataaataagtaaataaaatcttgttttaaaaaaagcatactgagcaagccagtaagcaacatctctccaaggcctctgtatcatctcctgcctccaggattcccgccctgcttgagttcttgtcctgactttctttggtgatgaacagcactgtggaaatataagccaaataaatcctttcctcatcaacttgttttcttggtcatggtgtttcatcacagcagtggaaatgctaactaagatatctctgtaggcacttccaaacatgtgacatacaaatacagacacatattcatacacatccatgaaaagtaaaataaatctttaataacaaaagaaatatttcagagtgtggagcaaggaaggaatccttaataaaaatcataaaaaaaaacataaaaccaccaaggaaacatttgacactttgacaactgtcaaatctaattaacgccttcccagtaaccaaatcagtgtcaacagcagtcaatccttgcacaagagaagatggcaacttctgtaagtggacacggagatgccacatataagaccctatgagactgtaaacaagaaacagataattaagcaaaccatattaaggaaaaataaagtacagcattcaaatgtactgacataggaatggtcagatttatggtaaactagagactctttcttttttctatcaacaccaaccatggtcctcatctacaagcaggcagcatccaagtgaaatgcctcgcttgtgttattcttctctgttacagcctagctgtagggttaagccttaggtcatatatacacaattaactttggtgcttccctactatcaggtaagttggattcatgttgctcagatgtgtttctcaagtctaattttgattgctaattcgtctacagaactgattcccttctccagtgaagagaaatggtccacttagccagctctccctacttcacaatgcaattggtgaagttctctctcccacttcccttagataggtgcattcttgtttaatgtagtacttcaactctgtttaaaatggctgcagacaatccagaagcaggagctttctcatatattgcaaatatcacttctatataaaagattctgtcatatatatctgagtctctgaaataaaagtatacaaaataaatgtgttgatgttcttaaaatatagtgaatatgaacttgtattgattttttattatataaaaaataattgcttttccatgaagtcatttttcttccagttcttctcttattgtaaacaaaaaattatagggtaaaataatattaactgagtgattaatagtttttgtgaattatcctcctctcttatagaaataggtaattctcaattgcaaaagttagtagcaaagtagaccatattttccaattctgaggaaatcttaatctccttcaagagctcaaatatgatggccacaaaacagagacatatggctcatctccactctgccaaaagatagtctcttggatgtaaatctgtagcagatgcactggaaaatttttattagaaataatagaggaggaatgttcagaaaaagccaatcttattattaggtgcaaattaagccacacagaagagtgaaaaatcagatactgggtatttattttctaggtacctttgttatacttaagttactcttacatgccatgcctatctgatgaaaatgtgccaaaaagacatcagacaacatcatgaagttttcaatgtttctgctttgtattttattagatccttatcataaacacacactctttggatatcatcctgctaatgtatctatcagtaatcacattgataaagctgagtaaaccaaatataaattataaaccaaaaaccacctttgttcattacttttgcttcactatgataaaatactaagagagaaataatttctttgggctcatggtttgaaagatttcagttcacatagttcttaggacctagattctggggcaaaatatagtaacagcaaaggcatacagtgaaggaactgatctcacagcagacaaggaatagagaaaaagaaagagacagggtaaagtcttcaaggcaggtcctagtctcctacttcctccagcaggctctaacatctccagaacctcctaaaaaagggggaccacaaacaagggagtaattgttcagcagataatactggggtgggaaatatttctagttaaatcataataccatttaagatctcatctgctctgtagctagtgttgaattttaactaggtttattgagacttgtgtatctatcgactattactaaatcctcattgagattttatttaactgtttcatcaaaagctgaaaaatatcaacattccttccaatagagagtgaaataattcagaaacagaactgaattcagatgctgaacagtgacatctaagctcaactcagaaagccattggtatctagcttctgagtaaatctaaacaaagaaacgggcttcatttataagtaagaggttaatttgatcaattataaaattttataaactaggagagttgaaaattttgaaggttagaatatagtacttctctggcataaatgaagttatagagcataacagtgctagtctagaagagtattgttttgcctgcatatgtatgagtgcagtacttgtgtgcctggtgtcccagagggcagaaggaagcactggattctctggaactggagttattgggctgtggacaccctagcagaacatgtcccaggtcctttgcaaacaagtactcttaaccactatgccattggccagccctccctgcacattttgataaatagttttattgatttccattgtctgttggttttgttaatatctttcacaaagtgaaaattttcaaaaccacttcccggacacaataatctaaaaaaaaaaaaaaaatcacttccttaagatacggctcctatagatatattgagttggaggaagaatagaggagagagagcaggatgagagataccatatcagagggagccaatataggtccgagaagagatctggaactaggaagatctccagagacctacaaggataacacgatctgacagtccgggcagtggaggagaggatggcctagaagcccttcccctagaatgagattgatgactactctctgtgctatcctagagtcctcatccagtggctgatggaagcagagacagacatccacagaaatacactgagctgaaatctggaacctagttgaagagagggaggaatgaagaatgaaggggtctgtaccaggttggagaaacccacagaaacagttggcctgaaaaagggaaagcatatcgaccccagacgctctttgggaggctagtaggggactaatccagccccctgatcatggatgccaatggggaggcccctgcactcctgggagcctcctgaggtggactggcgttttgccctggtgtgtgtgggggactttgagagcccatcctacttgaagggatgcgctctgtctctggacacatggggaggggcttaggctcagcacaggaagatttggtggacttggtggagcccaaaaaaaagatacggctcctaactcctatgtcagtcagcatcctttgatacccaagagacttctgtgaatccagagtgaacattccagacacatgggcttggcaactaccactccaacaatcattgttactcagtgggtgagcagcagtctcctcttgcccaactcatttctattaaagggctttattttcaacaacttataaactctccgttgttcaaaagtactttgtgcatttgaagtgccacacttcaacattacaggaaaaagttcaagaaaggtgagcttctttgtttttgatacaatttttaacttgctcaaagacagcaaggcctagaaagctcattagcaaaagaagaggaaagatgagccgaagaaatgactctatgtgagaaagaaacttttaaaaagaagataaacttccattgtgttttctcatttataaaatatgaatttagatatatcttgtttcttataagtttgggaatccagggcattcaatttagctgggctttgaatcagtacaaaatattgacaagccaatagccacaacacatcaggacatagatttttggattcaatttgtgagtcctgaagaagcatatgagaaataatgtaacacgaaaaataaatgacccagagactaatattgaggttcaaacttcatgctgaataccagaaaagcaaagcagcaggccactagcttcttacctctacctcaggctgagagggctgatccataagatcttcaccaagcccaaactgctgcctctcctcagtgtgcctagagaatggatgcatctctgagaccttgcttctgtcttatatactttcctaaagttcagattaaaggtgtgagctataattctcttttagactgatccactcttctgtagatatgggtgaccttgaactcagagagatccatctatctcttaacctgagtcctacgattgaaagtatgtaacacctcctcctagctttggactgctggtattaaaggtgtgtgcctggcttctaaggcttgtggctgaaattgcttttctgaatcctcagtcaagctttaataagtcataaataatatatcactacacttcccctttttgtcttatacaaaaagaaggctataactaacataagaaaaactatatacaataagtatatacaatatatctaggcaataagtttgtcaacaatgtctattctattttcatttgacaaattcagaaaaaatctagtccatttgcatttggcaaatctatcctaaattggtgaatccaaagtcttatacctaatttactttcgattttaatttgcattaccaaatatcttttactatctctcaaaccatttatactttacacatatatagtgagtttctttactgagtctggtaaacaatgaaaactacaactatactttctagtcttcaactccctcagagacacgagaagaaaataatattaactgagtaaacaggaagtgtgatcaagtaacttccaaaaaatgtgaaaaatgacaaaaacactgcgggcctgaacagtcacccaaggttcctctgcaacattggggcatccatcttttgggctataggcctggcatctgacagacttttctgcgaaatagaattttctgaagggctaccccactttgtcttggcaaggttttgctgccactctcttttgtgtattgcttgtccaatttggacagtatactgtcagcagtcaagacaagagtattttcttgtccagtggcttactttttccacaaagaaggcaaactccatgtgtattttctttgatgcccatcatcttctcctaagtagattggtgctgccaggagcagacacgtcttattgtcataaaaatacctatgttattaaaacattttaaatgtcatgttctgtagaacactgaagtgtttgaagacaacctatctttctaaaatatgtctgtctttgaaaacatacctaatgtgattacaagtttgattataataggtgactaattactcaccaacatttccttattatcttatataattggtaataataaatttcaagaactagaaatttgcattacattgataaatgagctgtataggtataataccttgaactaaattagaaacacatgttcagtatgttttaacaaattaatcttaaatttgtaccaatttacaatatttgtatacagcatacaacagtccaatcaaatgtaaaatacctaaaactaatagttgctttttaaaagtagaatcaataatcttccttttatctcatcatatctatgttttttagaagtggattcaataatctaccttttatcttatcatatctatatcctcccttttttcttttcaagaagagattcaataatctatccttatatcctatcatatctgtatcctttatttaaaaaataacaaccttgaatctaatcagtctcctttgttcaactttcttcctgactttaatcaacaagcttttgtaaccaatttccctaaacaatgacaaatatccataaaaatccattgaatgacaatacctcaaagccccattctctgccacccccacctcccccagggacacacttcctccaacaaggccatacctcctaatccttctaaaaagtaccactcctttatgactgagcattaaatatatgagtatatagggtcattcttattcaaaccacctcagtacatatgtgctatatattacctttatcatagtcctcatgtgtcaaaagaattcttatatcttataatttaaagattctcttaaatcaacatacacatgcatcacatatattaagtacaacatcattactaaggtatttatatattgctatactatgtatatattatgtactatttacagatttatttacatgaagttcagttgctaatgcagttatctagtagaatatgtttcttacatgctaaatatcaaatgtgtctccctctaactattttatgcaacatattatcatatattcataatgcacattcatatttctgtgtgtgtttgtgcacatttgagagattttctataactaaggatatatcctcaaagatgcccctaattggtagctgtatgacctgggttaatgtttctatgattctgtttcttggcaaaattaagataacattggtatactttaatattgtaagaaataaatgagtctatacaggcaaaattcttctgataaataatgttgactgcctcagtgcattgacatccaaggacattcttagaatccttccttcccaaacactatacatgttcctttagtgaataatattgagtaagtttattatttataaagtatcttatcaattttattgaattttgtatatacttttctcctagaaatctacagcatgcttgattccctttgttttcccaagtttaataatcatactaaccacatttatccattggctattgccttgcatatagccctcatgcttatttttattctctctatttcaagtagtatccattctattttgttctagtactgataaaggtttatttctgtggatttattttacactgtatatttcttagttttgctgtgttgttgcctgataacctttcttaaaaaaaagaaaagagggaagggagggagggagagagagagagagagagagagagagagagagaagaaagaaagaaagaaagaaagaaagaaagaaagaaaggaatgaaggaaggaagaaaggaagaaaagacagacaacacagagagaaagcagagagaaaagtagtactactgcataggtgttttgttttttactctggaggtccacacccatctcccaaataagtacatgaagatttatttttacttaggaatatctagccttagcttggcttgtttctagccagcttttctaacttaaattatctgatttctatttagctacattttgcctctgggcttttcaactttctttattctatatgtctttctttctttattactctgtggctaactgtgtagatgggtggctggttcctggcaccctcctctcctcctactcctccctcctctctcttctcttctctggagccaagatttctcctcctatttattctctcttcatgccatccctgcctatcctttctcctgcctagttattggtcattcaactcttaactagatcaaccaggcattttaggcagggaaaggaacacagcttcacagaattaaacaaatgccacaaaaaatgcaacacatctttgtatcattaaacaaatattccacaacataaatgaatataatacatcttaaattaatattccacaatgctactgtcttttataattttttaaattaatgtttaaattataaaacattttccttgtgcttaatatgatagattatgcctgtaatactagcaattgggaagctgaagcagtaggaatatgacagctgttttgagacctaccaggtcttcaaagcaagttctagagcagtcttggctagactgaaatcatctcaggaaaataaatgaatgaacatattaattaattaaatgtttctttatttaagagatgcatttgcaaattccttttgtaatcctgaaatacccattttcttcagcatgttattcttgtgaatttttattactatatttcctgctctttccttggagtctgtgcattccaagtgtatagatgtttttgcttctgagtttcttttgaataaagttacctgtgtctagggtggtttgctcagtagtaatgaaagcagcaggttgacatttgatccaggattgcaaagccagcaaaaaaaatgctgatccagtaacattttgcatttcttctctgaaggcaagccgccatctagacaggaggtactgatttccataacctttagtatttgggttgatacttcagctctgctcaaccaattcagtccatgactataaaatcaaaatcaactatgactcaatttctgttctccattatgatgtccaccatgatgcccttgatgtattgtaagtagaaactgaatattctctcaaacatctgtaatgtttcactgagtttcagagggtaacaatgtaacaacctaatacttttattttctccttcattttcaccattgactatctcttctttttgtaaattcaatctacatcacttaattttacatgatttcttccttggttggtgagatgatctgctttgattttgtagaggaacacgtgcttttcggttgtgaactctctgtgaagaattttaagattgagttgtgttctaggcacaagattggccctgaattttctcttttaattttaagaaattctactttgccaatggaaaaaaaagacatttgttggggaagctgtagccacgcctacttaggggctggctacagatgtgcctgaccatgcccttgcaagcttgtgtgtgtgtgtgtgtatagtgtatgtggtttacttacacatgtgtgtgcagagtccaggaaagggtgttgggtgatctcttctatcactctctgcattatccctttgaggaagagtctctctccaaacctagatatggtgttttagctaggatgaaaaccaaagttcccagcaatcctcctgactttgacccctaaaagtatggaagtctacaactgacttgctaaatggacggggagatacatatgccctcatagttgtacactaagcaatcttaactgctgaaccatctctccagtacccaatagtactttaaattccttcaataccaaagtttctgtgagtctttgattgtttcatatctacatggatgtatgaatgaaactgtgagagtatgtaaatgtttccaagttacttttcttcattttgtcaatggagaatttgatacacttatataatgtatttcagtcaagctcaccccatcgacttgtactctaatatcatacattctatgtcaacaacagagaaatgagaatactgatttaaaacatgaatgtcagacagtgattggttcattctcgcaaatactggccccattgagacatgccaatgcttctgatatttgttctcatggtgccatctatgctttcaccttccaagtttcctgcatcagtgcagaattctgtagtaagtgttcacaaagagaggcctacaagctaatggggccaaacaccggatactatatggcccatgagaaaagaactgtttgtgtattgacaaatggttggagaggaatcaaagtaaaagcaactttccctgacatgaaagaactatataaaatccagatgtctatgaccataagttcctgtggaatactgccatgcccacacatttcttatgctattcagcatagcagagtgtttgcaaaggaaaagcagaatagtataaatatttgctacagattgaatatttgttcagacaggtttaatggtttttgtcacggctaacgatgaactatccctgatggtctgccctcttttatattggtataagcttctttgtcattccagttttctttcataattaaaccggcacacagccctctctctagcaccatcctcatagatttcccaaactccagaaccaggagccaaaataaacttcctttctttgtaaattgcctcatcttaagtattctgccagagcaatggaagaccatgacagtatatctttatacccagcacatgtaatttattaattctcaatgattttctatattcagaaatcacttaaatttgtcttcttaaatttctaactgaatgaaaattctagttatctgtttttaattattgctttaaatattgtcatacatgatatgatagtttcaattcatagaaatagacatatatttcagtgagtgtacaatctgtttttacagataactactgaagaacatgctcttttctgcttatagtgtacatacaacaattgttctttaatttactaggaacattatagatttgggtgatggacctgttcaagaaaaacatgtcaaaatctattttgctgtgcatctgagagttttgctttgtaattctgtcagttgattcttatgttacaaaagactattgtttgaaagacagtataaaagtcttttcttgatggtgaattgaaatcatttgtcaatatatgattattttcattatattgtgctaaaatgttagttctctgtgtttatgaagcagtaaatttgttttgggtagattttgcatgatttatgtttgccaggcggttgtcagtgtaattatgtcattcagatgagactgggaatgtttgagtggttatggccatatatatattcttatggcagtgatggctatatttagatttattatatcatgttccttttggcttcacatatagtatctgaaattcccagtggagagcctttgttttagcccttcattcagcatgactttaacaatcacacagatgtaaggctcaaaaatatcccaccagactacctaaaactgttgacaatcagaagaaaaaaaagtggaaactgtgagtgaccctgaaaggttctctcttacatgagggttgctttgtgagctctaagaacttaactgaaaaatgttgggagaaggttgtggattagcatgcacacatgattttggggtagtgatatcttggacaagttttcatgggagacagagtttgactaattgtatttatgtgcaggatttgactcaggcccactgtttgtgctgaaatttccttggtgacactggacagggtgacactgcttcccagccattcttggacttgtggctgctacttggcccaggtttagagctgttctgctctgtgctgttacctctgctttcttcctttcttctgtgccaaaaatcacagctgttgctgtgtgttgcctgctttcccaggtgttgttttatattcagtatggcaacaggatttaaaaagtggtggcagtttgaatgtggatacccaagccagaaaagcaaagctggatgtgttccagctattacactctcctcttgttttgactatgcaagggggtaacattgtattggttaaccctggggatggtgtgatttctagatgtttacctccactcacttttatttctcaacttggtctcttttcattcacttcagaagcaaaaacttcaaaattgattgatagactacaaatctgaaatttactatagctggatactattaataacttttttttactttctctttttttaattttaaagtctaatctgttaaaatgaccagcaatccaaaatgtagcttgatgtatttctactgttttaaaacacacatctgtgtgtactccccacatagatcaagacaatggcttctcatctcttcagaagattgtccatgtttctttctgccttataccccatcatgccttaaaccccactattctgacgtttataacagctaattagttggcttgtgtgtatatttcctataaatgtgcaattattggaggtggaatttcttaagcatataaaatcacagtcctcatactaaagtatggaatgtgaaggaaaggggagaaataataacacacagccctaggatccagctttctaataagtgaataaaacaaaatcttcccagaaagcatgaacttgaattctatacatgagagtgtctatagatatgccatgagatataaatgtaaggaataactggaaaagaaatctacgactgccaaaatcccttaacctaaatactaaaagaactgatgcaactgcaaaagaaaagtcctgtgagtattagcccattattgaagagaaagtttaaaagcagagggaaaagtaaaatattggtatgcaaatacattgattgtttgaacattatttatgctaagtcaaactcatacctcactaaaaagaaatttaaaaaatgagtaatggaagctggtacttctaaatttcttttcttaaacatctaaggagccagcttacctaaagaactcttataaaaccttcagagcagttgcataaaccttgacccacttttcagcctgcctgggatttcatgcactggaaaattcttatttggctaatttaactgcattgcatgattcgtccattattgattattttgagttctgaacacatacaggaagaaaggcatggtgatgtcttctctcttgtggcattgggagtgtattatcttctattgtgcattgtaaggtttagccaagtaaattaaggcacatagatgtcatagacttgcaattttgtacaagctcagcatccacctttcagtggaaagatgttcttttcagctttcctctttgttatttttaacacttcacctgccatattaaaattaatcttgtttatcttttcctatccttaaaaaatattctgtgggatagaaagatggctctgctgttaagagtgtttcctgttcttcaacactagatttctgttcctagcacttacattggcagctcctgagcacatgaaactccatgtccagtggatttgatgccctcttctggcccctgaaggcctccacacaaatggcgtgtactcacatagatacagacacaggagaaaaataaagagaatttcaacgaaaaatgcttgctttgcccctatatgttaggttttatgtaggataacaactatttaaactttgtttttttattatttatgtgtgtgtgagtgtaagtgtatgcacatgtttgggaacacatggggaggccagaaaagcaacaagttctcttagccactgagctctatctgtaaccctggatactgctacaattcttacacctaggatggtgatatggctcaggaggtaagggtgatttcctgccaagtcccagtacctcagtttgacgcccannnnnnnnnnaagttttgataagagtcctctaaaattgtggtaaagatgctgaagtgtagcttttcactgttgatggtttctggtggagggagtaggaagaactcagttatctttaagggactgaccactaggagtttgacaataattgaatcaatatatgggcaacaaaaattgaacctgttgtgtttttttctttgggaggagaagtcacaagtctgggagggtgaacttgggaggaatgggaagtgagtttgatcagggtacataatatgaaattccgaaacaatcaataacaatattatgctggggaaaataataataaaacaagtcaggggcacatgcagaataataaaaaataaaatgcaatatcaaaatgaacaacataaaggtctttcaaccttatggaacactgtaatgatgattacagttagaatattgatgcaaaaaaagacactaagtacagatggtggttggaggaaccagtgcttctggcagatttataactgttaatagacattgcaaagtttgaggttcttttcttatagtacaggattctgcattttcttccttgcaaacattttattctgcagtatatcttaaaacaccataggcaagatataatgtgcaggtgtgtgtgcgtgtgtgtgtgtgtgtgtgtgtgtgtgtgtgtgtgtgtctgtctgtctgtctgtgtgtacatgcacacctgtatgcaagtgacaatacacatctgtatctgatccagtagaggcaagaagtcaacattaggcattttcttcaatcataatcagcctttgtttttgagacaagagatcttactgaactgtggagctcaccaattcagctagactggatgtccagcaagcctcttggatccacatttacatgaccagcactagggttactgatatgaagcagcatatctaccctattcacatggatgctgtgaatcaaaacttactgcctcgtgcttgcacagcaagcactttagtgcctaagccaactgaagatcccaaactgtcttttcattagcagttatcttttgatctgctagccttgagatgactaaaaggaataaaaatatattttaaattattgtttggcttcacatgactggtagtatgataaccataatggtttgcttaattcataaaaatacaccttactaacttactactttgtgcttttgtaataagactcatttggctattaatgaatgcccaagagtagagatacagttcagacctcattattttgaccattaaccaaagtcttatgctttcagttcctggtttacaagctgccaaaaattaagacaaacaaatatctttcaagcctgctcacagctgaatagctattctacagggcactttctctccactctgctggtaccattggaggattcttgcaccatgagcagccgaacctgaagcacccatggaagaatgctgttttaaagtcaattcttattctggaatcccatatacccagtctttgctttgcatacattaagcagaggaaattttaagatttcttttcagacaacactttctagcaaaaatgatgtcatttacctacaagactactttgacttagcccatcccataggcttctgtaaagcttcaaacatcatgatattgccaaacaattctctaaggggaaacactgcatgaaattgagctagattgagtagtatattttgcagactgcatcaaatgacttggtcagatcacaaaattcagatactgataaatataattactcgattcatttatttctcctcaatactaaaacatatgcatcaacatatccttagtgccatagctacttaggtgattatggctctcagttgcctagttgcacactagtatacagatattatctttcggtttcagcatatataatctgaccttcagttgtgagaaaacttctttcgtggtgaaaatgttacttgccacaaagcttcctcaacctgacttccccagtggagtgggagatgccttaagacccatacttgtcagtgaattctgtggagcagcccgaggcatttgacaaaatatgtactgtaccacacattaaaaaatgatgtgtagagtttgtaagtagtacaactaaaagtaaatacatacaaacaatgtgacaatagatgggcacagtgctgaggaaacaatattaaggtcaaggcttcaagacccagaggctatgattatcagtcactattctaaaaaagaaatattctcacccataacatctgaaggcagatacctattgcttctatgatcttatgtattagttacttttgtggttctgtgacaaaacaatgatgaagtaagttaaaagagaaaggcctcttctgccttatagttcaaggtccatcatggtagtcaggccaaagcagcagaagcctgaatatcacaactacagttgaaagatcacacagcaccaacagtcagaaagcagagtgaagaacacatggtcatgcttcatttcctataattcaggattccctgtctaagaaatgatgccttccacagttaagatgtgtctttccacatcaactaacctcatcaacatgccaagatggtgcatttttcttgttatcctggattctcaaatttacactaacctccaccacaagttgtaaacttattcatttagaaagattgtgcttagaccagaagagtggggagggagctaggagaataggaaggggagaagaggagggatgcagaggacatgagggagcagaaaggttgagtcaggggaagaattaacaagaatggagataccataatagagagagacattataggtttaaagagaaatcaggcactaggcaatgtctggacatttacaaatatgacaccaggtaacaatctaagcaacagaggagaggctaccttaaatgccctcccctgataatgagactgatgactgacttatatgccgcccaatagccctcatccagcagcttgtggaagtagaagcagacactcacaactaatcaccgaattgaactggaatccagatgcagaggaggagtgaagagcaaaaggtccagaccaggctggtaaaacccacagaaacaactgacctgaacatcggggacctcttgctccccagactggtagctgggataccaacatgggactgatccagactccaggaacatggatttcagtgaagaaacctcggaaatctacaggacctcctgtagttgttcagtacttatgcctagcacaggtggggactttgagagcccattccacatagaggaatactccctgagccaagacacatggatgtgggcctaggccctatcccaaaggatatgatagactctgaagacacccccccatggaaggcatcaccatccaggggaagcagaaagggtatgtgataggtagggttttagttggggggatagtaggggaggatgggagggacaagggaactgggattgtcatgtaaaacaattttctaattcaaataaaaaaataaaataaaataatttagacaaaaaaagaaaaaatgtcacaatgaaaaaaaaaaaaagaaagaaagattgtgcttagaaatgcattcaaggatccatgctctcatcatcataactcagatgtcttgaaccaggagatagctctgttgatttggtatttgtcttggcagaatgagaatggaagtgtacttccaagaacccatattaaacagccaggtggtggtgtgtacttgcaatcacagtgcaggggcagtgaggacacgatgccccatggtgctcattggcaatccagcatagccagcttgtcaaattctgggcctgtgacagacccttgctgaaaaaataaaggtgtctgacatcctaaagaagaatactgagacaatctatggctacacaaacacacacacacaaaagtgtacacacacacacaaaagtgtacacacacacacacacacacacacacacacacacacacatatgcaccatagacaatagataaatagatggtagatagatagatgacagatagttgataaacagacagatgatagatggtagaaaaaaagatgatctagctacctgataagtggatatataaaatgactataacacttactactttgaaggctagttaaatgctaaaccaaatgctttcatgcaccaatcctcagaggggccaatggttaatccatatactgatcatgggctacaatgcattacaagaaagtcctctagctctgagaccaaaagccttataactgaatctgataaacacctcaccgacatattacaccacatttctcactgttgatgcagaaaataagaatccttgaacaatgctggctattacaaaatgcttaatcaacagtttgtgtgctaataatattttactgtgtgcaaataaaatttctctatgaataccggcctcttagtccaggcagctaaatatacttctgaagagaagaaaaaaaaatgtgtaaggtcaaaatgttttccccagatttcttgctgatttaacaagaaaacttaatagaaattcctttgcttctcactttatgcacagcagagataaattcttataaagggaaggaaatgctacaagtgaagaaactaatgatttaaggagctattaacgattgtaaactgctttataggacagatgtccacagctgctaatagaaggcttgaaataggacttctcatgccatcctggttgttaaccccttttagagtgctcaacacactgttttgtgattaatacctaattggaatataccatagcagattcattgcagtgacttctgagaaggctttttggttgactcttttcaggccatacatttgaaatttgtcttctgatggttaaggataaacttaaacccgagaacatattcttatcccattcctgcaatgagtatgtccacatctactggggtgcattttcttcacatgtactcatgcatccatgtttatcctagcaattggggaattgccaataattgcaaaaggtcaggataaagcagaaaatttgtagattgctgtgtctgccatttgtcatcaaatttgccctataaatttcttcataatagagaggaatttttttattacaatatttaccttgcctttggcagagtttaaacaagatttgaaaaattactcatcgattttatcagcccttaaattaatactaaacattacaaaacattccggtctctaattgacctagtgtgttcaattcatgttgagatgtacccaaataatgtgattaggcattcaactaatatggcatggatatggtaagtagtctcttctcattctgtgtgttgggtttcatgtgttgtggtatgcatgtatgtatgtgtacacctgtgtagatcaaaggtagatgtctaatgtcttcatacaccactctttagtgtttgacaatctcttttcttgaacctacaccttgcaagattgactagactcgctgtccagcaaaccccaagtatcttcctctctgtctttccagttctggggttgtaagtacattctgatggtgtggtattttgattagtttagccaatgaattttgggacagcaagccctaaggtgtggtcttgtttgcctatgtgacaggttaaaagctgaggaagagggtctagcactctcactctcttgggtggtgggagcagagcaggtggcttgctgttggtggtcttcacccttgggcaggatgcctggaggaatgcagctgtatgagatcagcagcagcatgtaattggttttgtatcagtgagtgtttgtccctatcattcacctacataaattcttgagaccctttaacacattctcttgacttcctgctacattctggactttttaggtggatgctgtggactcgagtccttgtgcttgcacagcaagtaagcctttactgactgcatgaccattctcttctcatttttttcttatagatttatatgtttttattttatgtctgtgaaggctttacatgtgtgtgtgtgtgtgtgtgtgtgtgtgtgtgtgtgtgtgtgtgtatgtgtatgtaattcctgtcttctacagaggccagaaaatggcattggaacccttggaagtgaagttccagatggttctaagccaacatgtgggtgctgagagccaaacatgcactccttacaagaacagcaactactgctaactgttgagccatctcaccacttcctctcttctcaacctttacacacactattataattaaagtattttcaacctccattcctcctatttctatgtaagacagatgtaaacgggactgatgtccatgagttctgtccagtatgacttatttagcagtttcccttaagactagttctaatcaataaatatttacagtatttcatttgactaattcatatgtcaaactcaaagagcataatattttgacacattatgttcaatactgacttaaaatagattgagatttatgtttatcataaaacaatattttgcctgagccttgaatcatatcattagaaaattgaaagaacatttttctctggaactaaaatacacacttgttaatcaacatgggacacctaaaattgtcagaaacacaaggagtaaggtatactgttgtaaggtatactgctgttaactctatgcactaacttcctgcctcagcaccggtcagaataagttcaagtcagaaagtaacaaagtcctagaaatcatcattgaacagatagatctggcttagggtgtgtgtgtgtgtgtgtgtgtgtgtgtgtgtgtgtgtacctgaaaatataagaaagtacttaagaaaattactaaaagtttttctctcatttcaccaaaaatatattcacaaaaacataacataaagaaataccattgtctagtcccaggactgctaaagaatacctttatataaagcaatcatattttgtttctttgtattaaccttgaactaataaaacaatggaatttgaatatttatagttgcaataaaaattttggcaatgaagacaactaacttatatttacaaaaaaaaaaaaaagcacatggcacctggccctatcttgaggggatctgtactccagttcaatctgagttccttacagtagatccataaatccccaaacagctaatcataaaaatattaatgcaacaagcacatggtttatttatcagacttggcttgctagcctcttacaggattgccaggaaaagggaatattaaaataaacgatatatgtgttcagctctggcaataaatcaaaggaggtagagtccttgttagagtagattccagcacagtgtgttgctttgtcactttaaactgactagacattttcaatatttatagaattactatagtttgaaataattacctgggtagaattaaaaacccaaaatatattgaacattttaggatagtatatattttaagttatacagtcagcccaaagtaagatacatgttttagttttccaaaatgatttgttagagaatttacaaactaagacaccctttaataatttattaaaacatgcagttagaaccatttacaggaaaaactaacatgatttgtggtagtgccttatagcagctgaatttgcactgtgttctgtttttgtttggggggggagacactttctcactatgtcacccaggttggcttttaactcctaggctataatgggtctcctgccttactatctggggtagctgagaggaaaaggcgtgcattagcaaacacatctggacagatttacttccttagttcatcacttgctgaatgcaaacatttgacaaaaggaaaaaaaaaaaacaacaacaacaatcgtatgctgacagaattcggaaataccatccacactggatacttgaacattttgcagcccgcacaaccacatctgatcttaaacagagttactcccagggtctgtaccatccctatgtttggcatagtctgctttctttatttcttttttaaagtagtcattatttttcccattttattaaaattagatcctttactcacaccatatatcctaattatagtttctccttctactattcccagttcctcctcacctcctctcccatctggatcaactccctttctgtctatcattcaaaagaacaggcttctaagaggcaacaaaataaacataaaaagataaaccaaaaactatcacattgaagttggacaaagcaagccaacaaaggaaaagagccccaagagaatgaacaaaaatcagagacccattggttcacatacacagaagtccataaaaatactaaactggaagctataccatatatgcagagaaactgagggctggggtttcatggagatatcccatttagagctgtctctttctgtgtaatgtctggctatggtgaaaagagatggccagctgggactctgtctccctcattgcttagagacttcattcagattgccttcatatattttaggaagtttccatggcattaggtatacatgtcaccctccaaatgtccctcaaatctagcttttctccccaaattctgtccctcataacacatctacagtcttctttttttctccatttttttatttgaattagaaacaagattgttttacatgtcaatcccaggtccctctctctcacctcctcccctgcccccacacaactaacaccctacatatcccataccctttctgctccccaggaagggtgaggccttccataggggtttgtcagagtctttcatatcatttgggataggacctaggctcacccccttttgtctaggctcagggactatcgctgtatgtgggatgggctcccaaagtccattcctatgctagggataagtactgatctactacaaggggccctatagattacctaggtctcctacatgacacccacattcatggggtctggatcagtcccatgctggtttcccagctatcagtctggggacaaagagttctcacttgttcaggtcagctgtttctgtgggtttcatcagcctggtctggacccctttgctcatcactcctccttctcttcaactggattccagttcagttcagtgattagctgtgggtgtctgcttctactttcaccagctgctggatgaaggctataggatggcatataagttagtcatcaatctcattgtcaggggagggcatttaaggtagcctctcctgtattgcttagattgttcgttggtgtcatctttgtagatctccacacatttgcctagtgcctgatttctctttaaacctataatgtctccctctattatagtatctcttatcttgctttcctctattcttcccccaattcaaccttcctggtccctcatgtcctcctcccccctcttctccccttcttattctcctagctccctctccctcctcctatatgctcccaatttccagaggagatcttgtccctttccccttctccgagggaccatgcatgcatgacttctctggcagtgtggattgtaggctggtgatcctttgctctatgtctagaatccatatatgaatgagtacataccatatttgtctttttgtgattgggttactgagctcagaatggtttcttctagttccatccattttccttcgaatttcaagattccatttttttttcctgctgagtagtattccattgtgtaaatgtagcacattttctccatccattcctcagttgaggagcatctagattgcttccaggttctggctattacaaataattctccaatgaacatcgttgaacagatgtccttgtcatctacagtcttcttcccctcctgatcttatcatttctgccctccccaggctcagttcacccataaaatctattctatttctcccttctatgaagatttaattgttcctcttagtgtcttcctctatacctaccctctctggatcttcaggttgtagcatggttatcatttgtttaacagcacatgtaagttaatacataccatatttattttccttagtctgtgttacctcaattagaaacttttttttcttttttctttttttggtttttcgagacagggtttctctgtgtagctttggagcctgtcctggcactggctctggagatcaggctggaatcgaactcacagagatcagactgcctctgcctctgcctctgcctctgcctctgcctcctgagtgctgggattaaagtgtgtgccaccaacttccagctagaaacattttttttttttagttccatccatttgtctgcaaattttatgatgtcattttttaaagaactgagtaatataccattgtgtaaatgtaacacatttttgttatccattcttttattgaggggcatcatttctggctattatgaatagagcagcaataaatatgtttgagcaagtgtttctgtggtagaatgaagtgtcttttgggtatatgcccaagaatggtgtagttggatcttaatgtagatctagtccctttctgagaaaaagccacattaatttccatagcagctgtacaagtttgcacccctatgtgtaatgaatgagtgttccccttgtgccacaccctcactagcacaagctgtcacttgtgttattgatcttaaccattctggcagatgtaagatagaatctcaaagtagttttgatttgcatttccctggtgtttaaggatgttgaacatttcaagtgtttctcagctgtcagaagccagccttggtgactccccctgcctagctagccaccagctagcctagcatcccaccactcaggttctgggacctggcctgagaagcaactaacacctttccccatttccttagttgtgcttgagataaacataggagattccaaatacctggcctgagaagcaactaacacctatcccttcccccacttccttaacacaggagattccggatacctgcctgagagcaattagcattcattcctcctcccacctcctttttctctgcttccacctttctctttaaaaatccccttggtttcaataaagttgaccttgacaaggaaatctgcttggccttgctttttctttcccgcccattatttgcaggtgtgatccactcacaaattaccggagcccctccggacggggcactcagccattaaaacttcctctgttgagaattctctgcttacatctgtaccccatattttcattggattttggtttttgatatctaggttcttgagttctttatatattttggatgttaatcctctattggaaacaaaggtaaaaaaaaaaaaatcatcccattctgtaggctgctgctttatccatatgatgatgttctctaccttatagaagcttttcagtttcatgaggtcccatcccatttattaattgttgaagtaaatccctacattaaggttgttcagaagtattctcctgtaccagtgagttaaagattattccgcacattctcttctatcaaagtaaaatatatacagttttgttttgagctcttttatccatttggagatgagtttgtgcaaggtcatgagtaaagatctttttgcattcccgtatatgcagtcattcagttggattagcaccatttgttggagatgctgttttattttttccccaatgtgtatttctgccttctttatcaaaaatcaggtgttcataggcatatgggtttatatctgtgttttcgatttgattgcactgatcaacatatctatttttatgcaactattatgctgtttttgttgctatagctttgtagttcagcttaaaatcagaagggttttttgttgttgttgttgttgttgctttttttattgttcaggattattttaggtaaatcatggggtctttgtttttccagatgaaacttggaattgttctttcatggatctctgaaacaattttcatgagaattgcaatgcatctgtagattgctttcattatgacagccattttattgttagccctacccatttatgagcatgagaaatctttctatcacttgacatcttcttcaatttctttcttcaaagacttgaagtttttgttacaaaagtctttctcttgcttggttagaggctattttgaaaggtgttttttccctagtttctttctctgtcagtcatttgtatgtaggagggctactcatttttttttctttttagttaattttgtatccagctgtattgctgaatatgtgtatcagctgtaggagtttcacagtggagtttttaaggtcactcctataatactatcatatcatctgcaaagatatttgatttcttctatttgatttcttctattccaatctgtactctcttgatccctatgggttagtaggggtgcctgtaggattttgtggctggataaaggcaacaagtgtgggaagcaaagttaggagaggaaagtctgtgggaattacaggagaagtagacagggtggggagaaggaagactgaaggaggcattctgttgcagagctagggatgagactgggaattagatttggaggaaaagagggggggtgtgatgatggtcttcagttaatttacctgttttcctggtctgctaagcaggtatgttcttaggggatccctgctggaattggaagctaggataatggatgggttagcggaaggaaggttgcagaagatctttgtgatctactggggatgggtcaaagaggaaagggggatgttctattacagagctgtcaggagattatggggactggacctggaggaacaaaaggagagggggagatttgcatatttgcatacagcctacctgtttccctggtaggagtgccctttggatttacatgggatgcctgctggagttgaggggtagggaaagcacagagtcagggaagaggagttaggggtggaagatctgctagacccacaagagatgggatcagagagacagggaaggtagcagccagtgttctgctgcagatctgggggtgagactgaaggcttggatctggggaaacagagagagcagtgaagacctgcagtctgtctacctggttccctgacaggagtcatggttgctttcataaactttaaagaaatccttcaggaattctcaggtggtttgtcctctcttttcagtcaatggttcgtgttttgtgaaagttctcctatccctaattactttgcattggctgctgtgcctccttggagcccttttcccaccagaaacatttcaatcctctgtccctctagcaatgtgcaactttgaatagattaacctatctaatctctattttcacctggctgttttagacttggttaattcatacatatggcagcagccaaaatacaacaggaagtatatttagaactgtgaccaaaacaatggatggcctaagacaggaatgtcaagttcaatctgccacgcatttaccatgtctcacaaatgacccacaacagagttgcactctcatcaagaatgaccagttaattaaccttcgtataattcaaagtcattcactcattactgctagcaaagtcatcacaagggtggtgtgcttatccatccagtacacagaaactgcagccattatgtttcagaattccagtccttagagctcggtacaactatgctttgcctcaactgacagatttcctaaataatgaatttgttttgttgttttgtagacatcatttacaacaataccataacactcattgcttcatacccgtattataaatttattggactaaaattccacactttagactcttgaaaatactgagtttgtgtagctaaaatttattacttctttacaagttctgccaaatgacagttagtacaaactgatgacttgaaaacggctattgattttgtaaagtttccttctggtttataatgtctcccgcttactgacaaatcttttcaattcctttcctgcactccaaactcattttaacataaacttacctttcttttgtcctactgtgctactccataactgagtgcatagcactcccagtcttctaaccactgaggtgagaaatacagaggctaatctgttcttcttcccctctgtcagctttcaggagtaattacactttgagatatttccatcctgcatctactccatctccatgttctacacacacacacacacacacacacacacacacacacacacacacacacacacacacacagaaattccctttctcttgtgtcaaagcaaagacacagctctcaattcaaagagagacaggagacagattattctagagccaaactatgagtagatcacaaaaacatagatttaatgttccttggtcagctatgtagaacctgatttccttgctacttaaaatactcaggacagagtacaatccctaaaatcatactttaatcagagttcatgtcaggttgtgtcccacagttgaatcagaagagaggtgtcttgttactaatgttgaaatcttattgatttaaacttttaataattaaaacattagtttcttgatttcatttgatacaaattcaaagtttttcaaagacttaattatttttattttatatgtatgcatttttgcctgcatttttctaagtgtacccttttgtgcagtatccccagaggccagaggggggcatcaaatcctctgaagctggagttacctatgactgtatgctagctttgtggatgctagaaactcaaccagagtccttaacaaaagcagaaagttcctgtagacactgagcaatctctacactgtttgaacatgtttaaaacttattgtaattaaaatcatatgaacttggaaagcacattcattataaatatccaaaaggatcaagttcaagaaatttaaacattattctatgaactgactcaatctcaaaaaaaaaaaaaaaaaaaaaaaaaacctttcttaaaaccctttcattttcttttcctatattgcaacactgaaatatttacatcttgtcactttttggttgcatctaccaaaactgaaagttaagattgaacatattttgcatatccttccttgtatagtcttttaaccatagactggttttacactagctctaagaactaaatgattggatttcttattatttctattccatcataatctactgtgattatgaaatttcaatatcacatttctctggcatcctcattccaatttgtagcacttaagataataggacagatcgtatagaaatcatttcactgatgacatcttgctagcctaactgaagagtgtaactaacatcaactcagtatcattagcaagcttaacaggccacatatgatagcaaaaagatatcattatatttagggcattttcattttattatgtgaggaaaataatcagtatacaaaccataaaatcttattgtaaatatatttgtcaaatttatcaaagcatgtataaatagtcaagaagttaacaatatcagctgctctgccattgctcagggtttcagtggttcctggtacatgcaaagaagtttctaataatccctaaaacaggatgtaaggggagaagttggttctgataccttaataccattttccagaatgttcttggctacagcattactgatgagacaaattcttcactcaagggttaaacacatcagcatgactgtttcttatagtttcttgaagcagaaaaattatctctctgcagtgacttagaattgcatgatgtatttacagcaactgaacaactctgaacacttttgatcttctggaaaatatccacatttgtcatttgaactccatcaatagaacccacagggctttcttcctacaatgtggatctagctacaaggactgagatggtgaattcaagaccttagtatagacagaacaacaagagagaaaatctaaacagaatgtaatggcttgagggcagtcagagaggaagctggccatctgagaggctggggttgcaaaattgtcttcctcctcccagttgattccagcataggtgtcagtagtaggactgcctggctatggccttggatgatggagttgaagatgtttaagatctgcaagcccctgctgctgtattggtctgcacaatggtcactggttgtagcagctgtcatgagctacactttgggcactcctgaaagtccactcatagccccattcttctcaaagaaaagtccttccactccctccatcagattcagttatggttactattaggaccgtggtgaacattataatctggatatttgtgtacaacaccaaatgtccagagccaacctagaacaacatctagagatgttgaaaagaatgggagagaaagtacaacatacctaatttttttaactgctgttttcaagtgcaaatggtttctctgtgtggatttaagcatttaatacacagtatcttttaattttaatttaatttaatgacctaaaaatcattcaattttacaataccctgatagtatagccatgatacccttgaaaactctgatacagggtttattattcccaggttcttagtgctttttgctaactagtgtcctagcatgggttatatctggcttaccaaggctctttctgggagtcattcaagaagctgtgtgactttaaagcaatgatgcactgtatcgtctcaccgtccacatgactgattttgttcccagatggctataacaaaaatgaaagttctaagtgatctttggctctttcctgccactttcactccatgtttatctccaggcctcaagctctcgggagtgtaaggcctgtgtctgcactttaacacattaaacatcaactttcaaccttgccaggatgagtaggtttgacttctcttaaatgtcaacagagtcaaagtaatcctgggtcttttcttgtcagttagccaggacactcacagaatacagaccttcttttctggctcctttgtagaaggaataaagcatattgaagcaggagacatttcaaaatctgttgaaaatattgaaaaaaattatggaaattggcagggcagagtcttgatgcatcaaattattaaccttcatccctaaaaatatgtgactaaaagcagtgatcctcctataaactaaaatacttgcttcaaaaactgcatttaatacatttaatacttttatattcattttctttagaaaatattaatagctcctgaaaaactatgtcttcaaagctacttgaatgttgtgtttgtttcacaagaaaaaaacaataccttcaaagaggattattgcatggaaagtttttttttttttttaagaaatctaagtaaagaatgaaatatgccaaaaggaagagatgaaagaatgtggatggaatagacatacatgtagcttgctactctccaggaagtatctctgtttgcagacacttggctggagactgggccactcaatgtcatagctatttctctaaataacagaaaccaatatccagacaaaaaagtatcccttacttttaaatttcctttgcttgcgacttactttttttccccctgtttcagaaaagtatttaaataactgcttaaaaacaaatactaagtttaatggtactctttgtttcaaattacgtcccatacccctggcactctcttctaatagagatgtctgatgagaagtcatctgtgttagcttttctttggacgtttccactttggtgaggtcatagacagaaaaataaacccacccctaaaactacagttgtttgtggcagcaaatgtttcatcgggtcaggaaacttggagattcgacgccagagcctgaacaaaagtagacaaagaagacaacaaagatatcccctcacagccccaagcacactgaggtgatgggaagtttgacgaaaacatgtggacaacgaaagaaaagtgtgcagatggctgcttcttgtttgggaagacactgttaggagtttctcaagaggaccagtaaggcaaaggtgagaacccagggcctctattagtgacccaagccagcatctatttcggcatttcacccttaggcctctctcatcgctgtgagatgaagctttttcattctccaagacttggtctgtctttccacgaccttcaattctttgccagtgccagggagcaaattcagaaatcccctagacaaacatcagcgctcctattacaatgacgtatgtggttccccaccccataatattattaagtttttctaatgaatataatttttcaaaagttttttaaaagccgccgggtggtggaggcacacacctttaatcccagcattccggaggcagaggcaggcggatctctgtgagtttgagaccagcctggtctacaagcactagttccagagtaggctccaaagccacagagaaaccctgtctcgaacccacccccactcaaaaaaaaaaaaaaaagtttttaaaaagccattttttcaaagctacaaacatttaaaaatgaatgtttcctttcaaaaccctgtccacatggctaggattacttgtatatttatgtcattagacaaggaagggatttttacaatgtcttttatttaagaccctctttcatttattggtgataggaatgttactattatcattttgtaataaatcaccttaataaaactgcatataacttctaatagcattttatggatttattctatttttcctagtaaacaattacattatctgcaaagacatattaccacaccactttaattactacctaaaatgctaacaatttatgatatagcttaattctatagagcattgttccaaaacaatgctatttaacactgcagtcatcaattgcctttgtctctttttctagcacttctctgtccatttccttcctctgtcatctcccaggacctcaaagatgtcaagatggtcaccattcattgctacatattctccaccagccaatttatgtctgcaagagtatactcaatatgtgacagtctctctggacatatctaatgtgcattaattgtacaaaataatgggctcattaaaagatcatatacaggttccttgttcattcagtggttcccattttgcacctgtgtgttcagcaccatcctcttgtctcagcgctggagggtttcattcccactactgtcactttacttcatgttatcatcagtacctgagaagagacaagtgagagtctgttctcattattgatgctagaattcaaaagactaggggctttgctcattttttccctttttggtatccttattgctttctctttctttctttctttttttctttcttccttccttccttccttccttccttccttccttccttccttctttccttcttttcctttccttattctttacattccaatccaagttctctctcccttctcttctcctactcccccacatcccccactccacctcccatctgctcctcagagagggtaaggcctcccctaggaattgtaagtctgtcccatcatctcattgaggcaggaccaaagcacccagtcctgtgtctaagctaggcaaggtatctctcaatataaaatgggctcactaagtcagtttgtgcattagagttagatcttggacccactgtcagtcgcctcatatatcaccccagctgcaccattgtcacctatattcagggagttttgattacacagatgtctttatcactccaatgaacctgctcttcctactgaagagaaagcatgtcatctgccctctgctttcagagaacagggcacagattaagtgaagaaacacaaactgtaatttctgaattcacaagatgagaatcaaagagtaagtctgctgcatcaaatgccatgggagaggtatatgtggtgaatcttggtaatctataaatattcttgtacccattattcctgcagcttttgtttaaacattttattctgctttcagcttctgcttgggttcaagagttcattttggaattcattcttcgaccacatttctttatcttcatccttatcactataagcattcaacggctggaatatacagctagaaattaaagttggtttttgaaaagttttcatttgccagtaaaagtgtgccccttgagattaatatttcttactaatcaaaacccacaactgtgttcattgccataccaaggactgtcttcaaagataggcccccgaggttttaaggagaacagatctcagttaatccaagctttgaaaatatgcaatttagaaaaatagtattcaaatttgcactgagtaatattttattaatatggaggaaatacattttcttctcattcagtttctaattaaatggaagctcacatgtgaatacgaataaaccctgtttggttcatgctgcttaaattcttgtaaaataatcctgctccaactttgcaaagacacaaaccagcactggacattattttctcatttaattgtgtcaaggaaagacaaggttgtaccatttactcatttcagtattttaattcaaatactcaaagatgattcccttataatgtgaaaggaaacatgggaactaaattgtaattgcatccatcttttttcagttacaaaatgaaaaatgtccttgaaatgacgacacttgctctttagcaaaccaagtttcaatactagaaaattcatagataataaagtagtgggatgccattggttgaatttcattgccttccttcgtccatatatcaaagtcctggtctctctgtcatatattgtaaccatactttgagaaagggtccttaggagatgattaagttagaatgaagtggtacaacatgccttaatatttgactggtattccaataagaaggaaaaaaaaaacttataccatgatagagagaggagagatgacataaagacagaagatgctatctacaaatcaaggggccaggcatcaggatgcagctaaccctgttggcacctcagtcttagacctctagcctctaatgtagtgagaaaaaaaattactgtataagaaaccattacttgatagattgctcctaagctaatgccattgaccatgccacaagagcagtgaactgcaattgaaattgcaggtgtcagcccaccagaaggaaatcctctgatgggcaaatctcatttaagcaagagcacaagactgcagaccctgaatgtcttttgattgtgctgtgcctttacatgtttgtcacagttctctttctctggtatgtagcacgatgtgaatggacatggggacattgccactgcctttaatatagtgtacttatctcttggaaacatcgcattctatggggcatttttacctgcggattgtcaagaaggtgatcactccctaagcagtaccatctaatttgataataatgatagtttatgcagagttttaatgagtaaaaataaatacaatgatagccagggtctacaagtttcacccaaggagctgcatggatggtagctcaagttatgaatttaaaattgagtcccagtagcccagctagtttaaattcttttaaccttaatgttgtgggaatgtgttcacaggtctcagagtatatcacaactgaaacaaagcattggaaataacaaagttaaataactttgaggtgaaaaacccaagaagacaatctaaagttttagaaaggcacatagatgaatgcagaactcttcaagttcagggaataagaacgaaacagcccaattattactggttgatgtactctccttgctgggtttggttgatgaccaaaggtaatgattacttccatatacccatttctgccctcaatttcttgatgttataaaaaaactattaataaatggattatgtaacctaaagatttaaagtagagctgactgattttttcatatataaaagcttaaatttatgattcctttagtattgcttataagaaatatcacctttcaatataagtaataaagtaattggcctgccagtaaaagacctgacaagaagaccttgcttgcccacatagttaatctataacaagttgcttaggtaggaatgtatgtgagttcttgaaataatttgtttttcaactgtaatacataaaatgtttaatcatgtgaaagtgatgaaaactgtgttttatctatagtcatctacttgagaaatggaatgtaataattttgactcttgtactgcctgaaggttctgttggggtataaaagctttgaaaaaatgagaggatggagagataataaagggagagaaagaataaagaaacaagagaataaagaaggaaatcatcaagagagtttgtgagtgcctttttctcaagcccccctcagatagagaagtctagcctaaccaactccatggattcctattgaagccttgtgctcctggaggcaggcccctgagacagcaacaagctaatatgtaagcgttgtgagaaactaactcctagccataatcaaaataaccctgcttttgctccaacatgagtctttgagttcactcttcccaagttttcatactcttcatagaataacttcaaatgaatatattttatagagctggggagacagcttagttagtaagtcaaggacttgagctaaatcccttcaacccagggaacaaaataaataagacctaggtatggtggtatatactggtaatctcagtgcttagggaacaaagacacgtggatccctgggattcactgaccagttgagatttaaaaagaaaatttttcgccctttgcattatagtaaagatgcaaattatctcaatgactttgcaaatttctttgttttgttataggagatcttgttcagaattgtattctaggacccatgttgtcagaagacccatcctcataaaatgtatctcttgggctgaagaaacagctgagtgggtaaattgggtaccttgcaacaatgaaaactggagttcagtcttcagaatctatataaaacacaagcctgatgttgcaattgtaatcccaacctagcactgaggagatggagatggaaggatccctggggcttattggccagccagcctaggcacatcagcaagttcaagggcaatgattggagaaagcctgagaaagatcaccaaaggccagtctctggcctttacacatacatacaaatatatgtctgcctacacatgaacataaacacacacacagcaaattaataaactgcagtaaattacactctctgaatggatgagtactattttatcgttaattatataatttaactatttggacataatagaatcttataagttaccgagattagaaaaaaaattatattacatactcttcttgtcactactttaaggttaaatgaattatatcactattttaaaatgctataacatgcaacatggtaattttttttaatgtcaggcagctgatcactcatttaggttaattaataaaataaattatttaaataatcctctatcttgaccatgactccatgaaagacagaaacaacccagaataaatgattgactgactgacatagggtttctaaagttggaaccaatcatgcttcagattcccaatggggacagtctaaaactcattgtcatcagagaccaattccttgtttagcttcttggccctaattttctccttgtaccctttatttatctcctagagctcaccctcaataagtcaatgatgcaggaagtccagtgtaccttaggcattgacctcaaataagtaatatcagagagggtcagaggaagccaactctttagatatgagtctcaagttccttaactcctcaatcaaatgtcagtgagaacccttcactggtggtgggagaggactgataatgtctaccattttatactattgatacttgtcatgagccctgtatattcttcatccattatacaggatgagctaagacagggcataggtacaaggaaatggacaagttagtgcaatgacagttgaaagttgtaagcactgttgcaaagtgccctgttttgctgagagaatgtaagacactcagattgctttttattaaaaaaaaagtatttacctttcattttgcattccaacctccattctccctccctccccttctattgcaccctgcctccctcttttctacacccatccattcttcagaggaggtaaggccttccttggaaagtcaataaagtctggcatatcaagttgagggaggaccaagctcctccccactgtatcaaggctgagcaaggtatcccaccatagggaatgggctctaaaaagccacttcattttcctgcaatgggtcctggtgccactgactgcccctccaacccccttcatcagatcaaaccacattcaaagggcctagttccttcccatgcaggttccccagatgtcagtccatagcccgtgacctgagtttctactagctcaggtcagctgtctttgtggttttccccatcaggctcctgacccttcctttttcatatgatccctaatccctctcttcaactgaactccacaagctcagcccaatgctgaataattgcacctgcttccatcagttactgtatgtaggttttatgatagcaattagggtagccattaatctaattaaaggggaaggcccattcagacaccttctccactattgctaggagtcttagctggggacatccttgtggatttctgagtatatccctactatcgggttcctccctaaccccataatggctccctctatcaagataaaaatgctcgtatttaatcatgaatcaaaaggaatttttggtagcattcaaaatatccaggcatcaattcctgctgaagggaagtttaagccataaaagttttaaccataaaagtgaaagaacatttgaagaaagcttaaatcttgctctcgatctcaataacaaaccagaataatttctctcataagcaaaatatcaggattcctgtgattttggatgggcatattcccctgacctttgaatgaaacacaggaaagtgtgcacttttacactcacacagtctagaaaattccaggagttcaagcattccagggcacccatcttcttttaagtgatcaatgtggtcctgaatacacagataagcatgatggatgaaagaaaagaataaactgattcaagattgactccaactatcaccgactggtatttcagttttaataatttgattggatcatcccatggtatatagctattgatgagggcacttagcatgtatcctcagtgtttgtgcaataggttcatgagcaaagcagccatatcatcaacacaggctactcatgatctcagcaataggtattctcagtgaggttgatctagataatgtcatagataaatgttcagctaatcaataatagagaatatgttaaatattcatttgagtactattccttatgattagccgtccacaatgaaagataatgatatcagacaccttaatgcttagaactagcaattctggaaggtacagatgtgctggatagggttatgcctttcctgataacaatgactgaggaagcctcatcattagagatgggagacagtgtggcctgcaaagcatcaagccaaacagcattctgccagatgaatccattttaaccacagtagagctgtgatgatggccaggtgagcaatcatgcaacattgctgcagcacactgcactgtctgcaagttggcatctgtctgacagagttaagactcattggaatgtagctttgagaagatacacttagagctagcttgaaggagaataaaagtcatgtggtatgcatcctaaaccaatgggtagaatatatctttgaatcaccagtaggtaaatattacggagcaaaagatctctggagcaagggggacataatagctgccacttaaacttttttgagattagaatttagttacatttctccccttttgtcccttcaaaccctctcataaatccctccacactccccccttttcagtaataactgtaacagccagaaatgtcctctatctattaaccctcttctgatgtgtattctttagaaattatgaggagtcggaatcctaaatagaatggacatgaaaataatgtcccaaatgggagaagcaggaggatttgaattgcccaagcaaagactgtagtagatactatggtagcaggcactattgctacccccacctagataagtgctgtgatttttgcctgaagctgtcccactatctggagacctgtccttgctcaaaagctccctctgcttggaagttactcaatcagaaacatcagggacccagaggctacaatcgatgaacagcttggtaatgttatgtgatgtgtaatcgcaaatccatgctcctgaaagtccaggatagataaagattccagctgaacactgtagcctggtgttctcccaccaccactgtaaggtctctctgccttgttcccacgctccccccccccaccttccaaatgattccccttttaaaaactctaatctttacatctgcttgtgtgattgtgtgaaacccaacctattttcccagatttcccagggataaattctcttagagatgttttctttagatactgtttcagtgtaccatatataattgtattaatgaacaatatgcaacattatttaatatttatgaaatttatatctttctttgtgtctctctctcaaaatttatatgtgtgtgtatccctaatttattcatctcactcttatatgtcacttgatttattatgttgagttattttcaaagttttttgctgtttctaacagcaaaaatggtatagctatgagcatccttgtaggtgaaaaatgcttttgtaagttttaaatgtctgacttttctcaggcataagatgcttcttcaatctcttgctgaaatctcaaagaagaatgtgaaagtcattcatattttcacaaggaactttgatgtgtccacaatgccccatactttcataagcattagcactgtctggtaatgttccttaggactttaagggtttaaagatatcaccatggttcccagtttcgtctttctaattacttaagtgatttaaaaaatgttgctgatataactcagtggtgagagacatatttgggatgtttaaggcccagggttggatatctagtaccaaacacacacacaaaaaaattgtgtatgaatgagtatgtttttaatttttgtaaagagttttttctctcacagattcataggaattcttgtcaattctaagtatcaatcacattacctttgaaagtaccaaaaattttagatttagttaaattgaatttatcaaccgattcttaaagttttaatttttaatgtatttagaaaatacattgaagtcatgaagaattttccttctagttttagaattctgttttccagatgtttacctttaagccccctgttccaacatcatttgttgaatttcccctttattcgccctaagaagtggtgccagccctttcacatatgaactgtggggcctatacaattgtcttctacttcatttcattggtggcatactaatttatactgtattccaaaactgtgttgcttcattcttttattacagccaatactttttgaaagcataaggcaacattttctttgtcagtgctggcaattaaagtgaactagcctcgcaggtatcagtcaagggtattactacagagctgtatccccaggaaatgttttaactgtttattttgtaactgaatcggactggtggtgtacaggctggccttgaacctgtgatcatcatgcttcagcctcctggtaggtagaattaaaagcctactctactgggccaagccttcagccacttgtttcaaagttatattgttttctggtgagattctctgcactctcttctcccattcagtcttcctttccctggaagcatctaatgttacagaatttttaatgacctttcattaatatttcatgcctatattggaaagttcacccacttctttcctatattagtcagggacatggtcacaaagagtatgcatatgaaatgtatttattttcttttaaacaagataaataaccaagcactaagaactctttgttgccctgccatcgacctccagccatatgttcccatcatccactcgaggaacctgtggggttttgctctttagcagctcccataagaaaatccacatgatatttaatttgtctcaccaaagcccatagtcacacatattattgctttgcttgaaaagttcattgattttcttttcccctgcaaacatgtcaagcttttctccagtgatatctcctgtctttcttgtactggggtacatgctctgagcatgcccagatccctaatgtgattgtttcatgaacactgtcagctctgggcatcactcagcagtggctgtcagctggcatggaagcagggaatgcctccccagcctgtcaggtcaccggatgtaccggtttgaatctccatgttctccactttatttctgaaagcagtatttcacatttttcttctttcctgttgctgttatctttttggaggtaatgaatgagaatggtgactattagctcctcattaattttgctgttttcttttttctaagtagatgtttatactatttatcaggttgcatctctttgtactcagttatcctgtgccacagctggccaatattctgtaaaattcaaaattccttaagatgagatattgggtattttagtatttgttcctatatcaaaggaataaacatagtatttattaatatttggcacataaaactccaacatatctaagccatgcattctcaaaattaacatacatttcattttaaataaaaatatctagttttaataaatgctgttgcacattggttgaattttcttattggcttaataaacagtatttaaaacattaatcaattatatgacaacattctcaggtggcagatagaatggcctagtaatagcagttgctgcatttccagaggacccagtttggttctcagcacccataagcttccagctccctgacactctagttctgggatatctgacagcctctcctaacttctgagagcacatacatatgtgcatatgtacacatgcacacacacgcacataaacaaaatcaagcataatgaaataaggaatctcagacttcatgatgaaacctccattttcacaatatgctttaatatgttgttaatttcatttggccacttatgaatttaagtttttgcaccaagttcattgataaaagatagacaattgtgggtctttttaaagtttggaaaactcttttcagaataggtagtcttttgcaagaggaaaacttgagtgcctatttcagtttctttattgcttattgatccgttcgagttcttttttctcattcccagagagaaaagtaacttacccaattttctgtagccatttactggcagagaagaaagaaaatttagcttgggtctcattggttccattgcttctgtgcttagccactctgataagtactgtgtagtcatatcttgttttagaagatgcccctctaaattttagtataggaatacaaggaaatggacaaaatagtgaaaatcatgcatttagaagacagcgctgttctttagcttttagattgaaggcagacatgatgaaagaagaaaagcattacgttaccccaggcataacctgagtagtattgagtgctttgttgtggattggaaagtaaagaaaagagaacaagagatagacaaaacaatagaatgtagagtttcagggagtcaatataaacaaagcccctgaaatctgtgatgctgagattacatcgtgtctttggcatacaacaaaacacagcatgaaaaaaaaaaaacagaatgaaaagaagaatagaggaagatagacatggccacacatcctgcagggtaaggggctcctcttcctcatccttgtgtttctggtcctatggtgggaaggtcaaatactcagtgagcatgccagtctcttatccccctgtcatcactcccccagcactcatgccagataaaggagtgaaggaggcttatggaaacattggcatggacatctgcttccttccttccttccttccttccttccttccttccttccttccttccttccttcttttcttccttccttccttctgggatattctgctctgcctcacctatgagccccggtcttagatcaaatgtgtcctcctctcagtgaaacctctgaccctcactgctctgcgatggagaggagggttatatctagcttcctagactacagttaccatgtgcgttatttgaatattacttcagaactcaagaaccacaaaagtcctatttttttacttcctcaaatactccaaaatacataaacactcaaaagtcaaaaatgcatgaacactatagatttaagatgaatggttggttaacccatttaaagcacagataagaatttcttgaagcagacacataaaagtgcaggctaaaattctggaaacccatcaagcttggagtcggagctttgagaactccttgtagaggaagagagaaagcgagagagacagtatgcttcctggacttcacaaaccaatgagaaagcagtttcaaagaagcaagaggctcttgtcattgtcatgcactccttagcatttgctgtgaaagaagcaagacgcaaacactgcccttcaaaagctgtgtttctggctttgcagagatgagagccagggttgtttttccaggatttcagtgggcaggatagagggctaaaatgccctgtttttaattttctgtgaaattcactgttctaacacagaacacaaatatacttaacacagctccctttccttaatacaacttgcatctaaaaataaacaaaacatatggaaaagaattatgacgcataggctgacatgagttaatgaggcaccagttattcagaaatcatcattcaacgcattgtctgaacttgagcgggaatttcagatttctgttcttgtacccctctaggcccaaacacaaggaaatacacagagctcagtcatttcccctcttgactcttttctgtttcctgtgtgtcttctgctttttcccacccctcatcctcagtttgtttttcctttcagtttctgctttgtcaaatactttcattgtaattagtggaaaggcatgctagcagtaggttatgtttgagaaccaaaagtttgctttgctttgtttttttttttttccctcctgatttatcctcatctggaagttgtaagttgtaataaattaattctaacttaaaaaaatagagttcagtatcaatgcaggataaaattggttagtattttcagtgttgtctctacttgaagcagaaattcccactgctattaacctatattcaattttgcagacatggatcctcaaatgacacataaatgtactatcattgtcttgagacacttttcctctgaagaaacagaaaaggaatgctccacatttcacacattgtattacaaacatttagtgtcaggaagaaaataaactggacagtcaccaagtacttggataaaatctctggcccacctgctagtgttagacccccgaaaactcaagtatccggggtctcaggccaggttcgcggtcaccccaatcaccaggcggattcgagagcttgctgcaaactgcacgaggctttattgtaatttaacgaactaaccccatgttagctcgggtctttcacccacccgccatggcggacggctagaaaagacggctcctaaggtctccccaaagatcttatagggcagcgtaaggggagtgtctaggggtacgcacaggctcaggattggtgtgcttccaggcttggagggcttgccctgtgttgattggtcaactggttgttatggctcataggccctcccagggtggttgctatgctctctacgtcattgctgtgcgcttgtccgtaaagcacacccagagccataaagcatagcgccaccagctaacttctgattggttccttgtcacgagacaggcatctgactttctggtttctaggacaaggtcatagaagcacatgttcgaccattatggctgccaaaagggaagctggttccttcactagcacacagcagtctaaactaaagtcctccacccaaactgttttttcttgatccttttctgcagtgtaccaggaagctgcaccatgttggctgacaatttcaagtattaaatagaaagttgttcttaatgatgaccttggcagaagccagttctgaagtggacctgaaaagacattcacaccttctgcccatccctgaaaatggtgatctctaacctccttcatttcaataaaagtacaaacaaagactcctgcagcattgctttcagatccatgaataaatgcttttttcctaactttttaaatgcaaagttctcaagataagtacagcctttcctctttcccatttaaatcacggtctttggctttaacctacttaaaggttgtacaaatggcgacaaaagccacttcagcggctgacactgcattgataaatatagaggagaggaaggaaaggacaactcctgcagtactttccagtttaattaaaagagatttgttttttcttgcctctaagggtcatggttcaagactaaacctaatcaatagtgtattctttcattttattccttcatcagtgtgttagaaactatgaataatcttgattttacagaaggaaaatacaaagtgaaagtagctctgaactgcactttctttttgcaaaaggggggtcaagacccaaacctggttaaattgccacctaggtgggaaaatcacatcattcttatcctagcatatgtgatgactgtgccttcttccattggctgggatgtgactgagtattttccagatcaactcatttaaaggaaaaaaacaaaacaagcaaaacaaaaactatgcaaagaaaattaaagaaagagagaaagggtctagaaattctggccaccaaattctagaaaatggggagggagagttgtataaataaacatcttaccaggtgagggaaattaaaattttgtataaacgttttataaggtggaagagattaaaagttgagaggatttttggaattgtggtctttggcagggtaggtacctttcataaaataaagcaaatacttcttacatttgtgttctgaactctaatccatatttgggagagcccaagttcatggatatttcattttgctacatgcctgaatcaaaaaccatgtgagaacttggatcatacaggcctccatagcctatcatcggacactcaaggtttttctttgtttgattctgtgttggagctccatccacttcacttcctgggcgaaatgcctccccatggtcacccttgagaacctgtttttaagtgaatattttctcctgtgtgcatttaaaagatttcaagtgttatgccatatatttaggtattttaggcttattatacagctcagtatcattacttgtttactcaaaatcttttcaaaaagtgtattcaggttataacagcactgtatttgattgcttctcatgctgtattcatattgataccacttattcacttaccttccttgataagagttattgtagactacttctaagaattctactcctacaaataatgcgacattgaagatatttaatcttgacttcggtttgtgatctttcattgttgactccaaagagttgctaagtcaaacttgctatctcttaattaatacgtagccttaggcactaatggtttcttctctgtactcctgtcctgcagtgaatgactttcgtacatactgagagcatcactgttatttcaaccagtccttcggacttttcccagatcagctggagtgaaatgatatcttgctcttatgattttcattttcaaacacaagcaaagttgaataaataatttgtatttttataaactatcctaatgtccttctctggagctgcttactattctggtaaaagaaactccattttatttttttcctattgtttatgtgtaaacctccccatcctcccttgctctcttgtattttctttcccggattcattatcagtttcaatagtgtataccctcatacatgtttacatatgcccctttgttaccaaatagctacagacttctctgtgccgtttaatgttacaaaagtatctcttaaccagcaaatccaacatgtgtaaacactatgtcaatactccaataacttcagaaccatgtatctggatgaaagaacaagagaagatttcagggttatgggttccatatgctgagtgtagactctaaagtgtcagatactcctatgtgctgctttagcaatctagtggagaggagatgctatcgaggatattgaactctataggaactttcatgctgtaggactcaaataaggcctctatgtccaggttctaaatatgtccctgttctcatatactacatgcagatgtttgagagtaagtaagttgttttaattatgaactaatctgcacttgatgaatattattcattttgttctaaatataggagagtcaaaacccaatcaccactgcagtcagcaaagataatgactagttaagcattaatccaaaaagaactatttgtcagaattcaacataaagaaaaatagtagtaggaattgatagggatgccagacagcagttagagatttagttttcattgcatgctaaactaatgagcatagtagtttgcattttatataaagacaatatagaaaaaaaaaggaaattaaatgacttgtctgccatcctaccaagtggtaaacaagtggtaaccagagtctagatgcaaacattcaatgtctagagactagtaacagaagttatttttcctacatatagtgattcttcacatcataaatcttgtttttcaggctgaaattcattgaaaggagttaccatgaagtcactgtcatcataagagcgtgggataaaaccccagacaagtttaagtgtcttaatacacatttcatcataactaacaaagccaaacatggacttaattgtttcccagacccactcttctacagtatttagaccatactgtccaccagtgatggactcctgatttctctttttctctctttaatatttcaagaaagaaatatgaatcagtcatgtttgtgtttaaccaaatcataaatctcaagtatctaatcttgtagactgatttctcttgtaagttacaagctagtcaggtcagcaataagggtgagtggaaggggttttgtgtggtataaattttgctgctttcagtcttcaaaagacaagagcaagcaagagaagtagggcattcaatgcggtagtcaccagcattctaaccccttccccatgtacaatgtcatccatgtgtagctgcaatcttttactctgtcttaaagagacattagctccagttgatcctacactaataacgcaggtccatggtgtgagctgtttccaacacctcagaatcccgtgtcctataaatgttatcttgtatcctttgagataattacaaccttctgacaaaacatcaatatggaattatgtggaaagaagtcaataatcataactcaaatttttagaagaaaagtagttgctaagaactggaatttttactcaaatcttcactagacagtagattatttattcctttattcctactcatgatctgtaagcctgtatttctttcaagaatttcttttgacccaaatctattagccatgaatctaagtccataatgatttattctacaagatttatttcacctcataaaatagtggtgttgccaaacatattgggggttatttagaatctactgcttactctcattatgtgctggaatgttgttgaatatattgaaaatgagtctttatttatcccacaatacaatatgtccactttcaaaaatactcatttactcatgtaaaataaaggactgtaatttccaagattttacttccaatatactggaaccattacaacttgttacggtagcaaacttccagatgataagaactagcaaagagcttaagaaaaatctgaggtagttgataatatacatcatggtggaaagttcttaacagtgtcatagaatgtgctgtgacttccctgccttctttatttttcccttgcagaatctttgtgactgctgatgtcttaaagctcacctctgtcatttgttttctcacctgtaattcccagtcatttgtctgtctagagcacatgcagagtaatgtctgcttgttttcttcaaacagtgtttattcagtcttcttactaggttttttcagtttggtgttactctcaattctatttttgttggttttgcttaaagcaattttgcttttatatgtaaaattcatgcttgtgatttcaagatttctgattataattttaacaattactcaattcttcatatgatgaaaaaataaaatagttgcaaaatcataaacacagctgaacaggagagccaacattttaattctctgtaaccaaagtatcaaatagcaactatcttcagatagtggagtcttgacaaaaatctcaaatttggcaatgagagtgagtcattgcactttttgtggccatatataaaaatcagtgccaacatggtaaaagccagctccactaaaccatatcatcttatcacatcttccacgaggctatggtgccacagagataactctccagatgtcactgattctaatgacaaacaaatgaagaaggcccaaatatttagttccccgtattctaagacacttctggggaagctcactcctttctaatcacgtggaaaaattgacaacctaccaaaaaataaactagaaagtcaacctgagactagatagaacaaagtgtggagacaaactgacaaaatgcaaacaactggctttagtgaaagatctttgggtctgccagcagtgacactgtgttggacatccaagtccacagcacatcccacccaaagttgacatactgcttggattgaatcccaagaaagtcaacttccaatccactccacagcctgaggaaagccagaagaccacacagtgaatccgaagaacagggagatattaataatgccacacttgggagtttaagtagaaacctctgcctcctcaaaaccacctccaggccctgcccaagaagaagaaagaaccccacaggaaactacaacatcaagcagacattagttatgtcaccccttgaattttaagcagctttcttgggctcctcaaagcccactcctagaaaaagttgcatgaccacgtggtgagtaaggtcagtatatagacaacagttccaccatgcttgggagataagcctatactcaccccagactccaggttcattctctactactggaggaaaggattttaatctagcattcacactcaatctgtgaattatggtctgtttaaccctcttcaactaataatacaaacaatggtacattttgaccaagaaacatgtcattgtaattcccattccatataaaagccactaatagaaaaagaaaaaaaagtcacgataactgcctcacctgaatgcacagcaagagtggtaaataatccaatcatccagagaacataaaaatatctctgcttcctaaggacattgctagctgacccagtcacaatcataagctagaagaaactcttaaggtttactactacaaaaacatacatacaaaagccagaaaaagtagttttctctggaaatgtaaagatatcaccttcaagtcataggatagataacaaatactcaaaaaattactaggcattcataagactctaacaaagctctaataatggactccccaaaaatgtatagcagatgaggaaaataattcaggataacattttaaagtccatacacatatcaacaaaaaatatgaaaattggaaaatagcacatgaacaaactgagaagtctgtgagaaaacggaaattgttttttaagaacaccaatcctagagatggacaatgtaaggacctagaacaaaactgtcaaggaaaatttcaaaaattgtcccaagttgaagaaaggtcaacttgtagacagaacacctgaaatcactcaactgtaagaggagaaaagggaaaaaaagtaacaaaataattgtgtaaattagcgaacataaccagttgtagaatggttgcctagcataagcaaagcctctgttttgattacaaaggcagggggaggaagaggaggaagagagagaaattagagaaggcaaagataaagggccaaaactgatttttaacaagacaatagatgaaaattcactagtctgaaagggaagccaacatctaggtctaataagtacagtgatctcccatcaaatacaaagcaatgagaaatttattgcaacataccaacctgtcaaaaatgaaatacagagggaaaacattaaagcagcaagagataagaaaataccacatagaaaggagtcatacaataatttgcagacttctcagcagaaatgtggcagtccaagagagaacatgtaaaactggagttttcttttccaccctggtcctgcagcccttcagccccaaataaacacatagatattatattaattataaaattgttggccaatggctagggcttcttattggctaactctgtcttaattattaacccatttctataaatctaaatatttccatgtgatcttggcttactgaagaatgcccggatctattactcctttggcagctacatctctttaaggtctttctctgcctacctttacccagcaaagatattcttcaggaatgaatgggctcttaggaggcttaagtaggtcaagacaaccctggtgacctgagttcaatccctgcatgctacaaaagaaggacaatcattgcctataagttatcctctgacttccatgtgcacaccagagcacatgtgtgggcacacacacacacacacacacacacacacacacacacacagagagagagagagagagagagaataataataagaataataaatattttaatattaaagaaatgcttaaaactgaaagagaataatggaaattgtaacaggccctccaaagttctaaagataataaaatatacagacaaagtaaatattcagataaatttgaaatgctatgatactacgaaatagatcattaatattggaaattgaaaaatcaaaatatgcaaacaaaaagttaaaggataagcagttttaaaattcacaattatgatattaaattgaaatcttttagagaatgaagttaaattgtaatagttttcattttctatataaatatatctctctccactcaccttaggactacatgcccactcagagatccatctgccactgacccctgagtgctgggattaaaagtgtgagcctggctacgcacattcttaataaccttatcaggaaagagagaaaaccaacagcaaacagactccagtttccagttagtttcactgtgttttcaaagccttttccaatagcttagaagaatgcactaggttttagcctgttccagcctgtgtgtcagtgtaattcctaagtatatggccaaaggtgagccaaattatttatttcatgttttttttttcttttttgagacaatcttaccatgtagccctgggtatcatagaatttactatgtacactatgctaagctcaaactcacagaaatccacctgcctcttttcccaaaggctgtttgtaaagatgtgtgcaaccatgcctggctttttagttgagtctttgtttcctaaaaatagtcaaacatttttcttttcgggtttttctttgagatccaaatccaatttaatgaggtctcttttgttgtatttaattacttattttggtatagagtgtgtgtgtgtgtgtgtgtgtgtgtgtgtgtgtgtgtgtgtgtgggtgggtctgttgtggacagaggttaagctatcttcctcaattggtcttcatgttagtttttgacccaggatctctcactaagtaggagccagccagcaaaacccagtgatcctcctgcctgtgccttcccagggataagattcatgcttgggctgaatgctgagaatctgaactcagggcctcctccttgaatgacaggtgccttattgactgggccatctccctagcctacaggctcttctttgtctgttttaaataataacagccgaatgtctgtaacacaaactcaatatgctggctagttttatgtcaacatgacacaatctagagtcataatttcagaggaggcctcagaaaatacctctatgagattggtttgcaggcaagcctcaggcattttctcaactagtgatttgtggaggaaaatatagcctaatgtatgtagatgttctccctgtcctgttctgtgctaccacctaaagtcatattgatgtccacgagctgtgacatgaccaagttggtgactgtggtcctactgtggcctggggcaatgttgatgtccatggccagtgcagccactgagggctagatggtgtctgtggtctgtagtgccactagaaaccatgctgaagtccatagtccagactgccactggaggccatgtggatgtccatgatacatgctgttgccaaaaaccacttagaagtccatgaccagtgctgctgctgactgtaaatgcaaggaatcttcttttgcagtggtattgatgactgctgagttatagttgagaatgagagacacagaaggcttctgtaacaacttccctatcctccccaaaaagaaatagtctagacaggaagtcattaaagaacactcttaaaaattgagacagggatgctgaagtgtagctcttcatagttgatgacttctggtggtgtgggggtggggaaggagtcaattttcttcaagaggctgggcactgcactaggagtttgaccatgtatatgggcaacacaaagtggtctttgtatgactttttttcttttttttttttcaagaggaggtcacaagctttgtggggtggaacttggaggactggaaagtgagtgtaatctggtacattgtgtgaatttcccaaataatcaataaaaatattatactggaaaaaaagaactcagtttgaaagagctatggacagcaagctagtaagcagcacccctccatggcctttgcataaagtactgcctccaggtttctacctcacttgaattcctgctgactctgattttgataataaactgtttcatagaactggtgagtgaaataaacccttcctttccaagtttctattggtcattgcattttatcacagcaatagtaaccctaaggaagatagtaagtaatgtaagaccccccgagggaagatcctcactcaagcactcaagtctcgggatgatgcaaccccctaagaactcacgagagatcgtccttgctgcaatcgcacgaggtttattgacaggaaccagagcgctggggcagagactcatatcccacacaggggtagaggagtttcgaccctgaatggctgggaataggggtttttaaaggaaaatttcacaacccaaaataccaaaaataccagtgaggaaagaaaccccaacccaaaataccaagaatatcagtgacaggtcccgagggaaatcataaggggaaactccctgttccttaaaattgtttgtaagattctaatctaactttttatggctagccttttcctggaacagagttgctgaaccagctagctaccctatatcctaggccttattttgtctgctgagggggtcttctttatcctggcctttcagtaacacattcttgtaattataacatttgcaaattttcaaccacatcatgtaaggaccagctccctacatttcagcagccataacagccgaacacgtatttgtctgaccttgtcttagtcactaaggtcagatgcctgcccctttcggcagccatgacagtaacgagtgcttttctgaccttgccttggtcactagaggttaggtgcctgcctcgtggcaaggaaccaatcagaagttagctggtggtgctatgctttacagctctggtgtgctttacggacaagtgcacagcagagcatagcaaccaccctgatagggcctatgggccataacaaccagttgaccaatcaacacagggcaagccctccaagactggaggcacaccaatcgtgagcctgtgcgtacccctagacactccccttacgctgccctataagatctcttgggaggccctaggagctgtcttttgctagccatccgccatggcgggtgggtgaaagacccgagctaacatggggttagctcattaaattacaataaagcctcgtgcagtttgcagcaagctctcgaatcagcctggtgattggggtgaatgcagtcgtggcctgggaccccggatacctgagttttccgggggtctaacaaaaccacggaagccatgaggttccacctgagtgggggaacgtggacttggaaattcctagtaacccaacatcgataaagaccagacataggcatcttgtcatctttagagagctctcagtgccatgctacaaaactggagtctcgtctttattcagcatcttcctggctgtttcctaactgtgcttccttgaccctgagactgcttctcttccattttcctagaccctatctggagatatctctcaaccatctcccttcctgtagactgatagttcctaactatctgtcctcaccagacttagacttagccctccgccctggtgcaggcctattcaaatgcttagttctatagagattcaaactaggggacattctccactgaggctatgccatccaatagcagattagctaacatctgcaatacaattgtagaccagagctcctggttactagaactagaggttttttggaccccagacactttctaatagaatcattcttggctcccgacagctgtgccgctttgcttgaatataataagtaagaaaatgctgtgtcttggctattgagttcaccttgtccaccagagaacttctgaacactgtggccacgaggcttgatcacaacccctggagcaatatggtagcctcctgactgtaacaagctctgaagttcttcagattttctacagccttgctacagccactgccctaaaacagaaggtttcttatgccttggaaagttgagcattgctgcttccaagtatgcaaagctggagactctagaagctatagtggtattgaaaggccaggataaagaagacccccctcagcagacaaaataaggcctagaatatagggtggctagctggttcagcaactctgttccaggaaaaggttagccataaaaagttaagattagaatcttacaaacaatcttaaggaatagggagtttccctttgtgttttccctcgagacccttcactggtattcttggtattttgggttgtggtttctttctttctttaaaaaaccctattcccagccattcggggtcaaaattcctctacccctgtgtgggatatgagtctcggccccagcgcgctggttcctgtcaataaacctcgtgcgattgcagcaaggacagtctctcgtgagtacttggggggtcgcgtcatcccgagacttgagtgaggatcttccctttcgggggtaggccttacagtatttgtctctccttgaagcattttgaattctgcaaaagatacatgaaaactaatggtaaaaaaatttaaaatcactttaagaaaaaaaacaaggacatcaaatctacactgtcaatttgctcagagatatatgtttggctgaggcagaattggactgtatatcccatgcagatgcttcagtagagacaaactttggtctcaaaaatgctggctatatgtatgtaggtgaagatgagggaagagttttgtgtctgtaatactgggagacctgatggaggtgctctccatcagtgagaatcaatgcccttttactgcattgaggtatgtattacgattaaagtctctttattcaagaagacaccagggcaaaacacaggccagaactaggttatagaacccagcaagcacgaccagaacaaaaagggcccgggtccccacgtgcagccccttaagaagctcccttacgtcaccccggctttccttcaccacgcccttatgggcgagtcccgggtccacctggtacctgtcccaggactattgggtggggctagggtgtctccctacaattccccttttagtctaaaagaggattaaaacttaatagtataaaatatccaaaactaacaatcataagggtgaaatacaagaagatacaataatctgctatggtacatcctatgtctatgtctaacttgaacnnnnnnnnnnnnnnnnnnnnnnnnnnnnnnnnnnnnnnnnnnnnnnnnnnattcttaactagacttacactaccctaatacacaataatggggaatggggacgtagcatcttttaggttatttcctgctgaaatgggacgatgatagtcatgtgggggccctgtagaaaaaaaaatgccagtacagggaaagtctctaatgagttatgtctagtccatgttagatgagatttgtttgattgaagatctacgttgaaatcctcaacttgattgaagtcattacaatgagttgaatccagtgcagtcggggaggtgtagtccaattctttttctggagcatgtagggattgctgtcaggctggttcttgttggctgtatgggactcaaacgtaagtgtcatcagagaaatgtttgcttgttgaaaggcaaaccttgacaaacaacgattatgagagggtgtgaaagaaaaagccaagaaaagacacaaacactcggacatagaagttgaggctgactctatatgaaggaggaatgggaacattttcaaaacaaatgggaacacctgggagtctattaggttcagacaagaattataccagagcagaaccgacaggtattaccttccttcactattcctcaagatcagaattcactgataaacaagtggtacttgggattggcaaagcagtttgagttatgccccacttgctgttctcactttagcttgacttagctcaaagagtgctgactcaaaggtaatttgaatttgtattcccattgcaccgaaccagtcctatgaagtcattaacagattctctggtctatcaaaattaggactacagaacttttgaaactaatttccacgagtgatgagatatactttgctgattttaatcaagacaggctaatagtaggcaggacatttaaagactcaagttgaaaatattaaaaatgtattaactattagctaaagaataaacaaataagtattttaaagatcatatcatatttggattttaattaatgttagtgttagagtcatcactttcattaacatttcttcttgggtatggagagacagttctgcagcctgtaacctcagatccaggggtgcaactccctcttctggcctcagtgggcatctgtgaacacatgtgcataaaataaaaatgaagtaaatctttttaaaaccttttttggcacccacgcaaagcagttgaggtcattaaaaaaaaaaatcagactctacttgtctgcaggtctccttgctgatatttgatgttaggttatttttaatccccaatgagagcaaaaactagactctcaaaggaaagattgaaagtttttaacgtatttacatttctgaaataagttgctttctatggtaattgccaggatttaagacattttcttgacagctgctgacttcagactcaagaaatgttccaacaggtaatacagagaaagaaaggaagaggaaacgtaatgaggcatgctttagtaagacatctgtagtctttttctgtttgggcttttcccttgtcagtttgattaatgggatgtctttaaatgtatctccttttggatatcttacatctcaacaagtccatttcatgttcttgccaccaacatttccagtagatttcttctaacatgtcagaatgacagataagtttcagtgttggcctcagagagaactcattattgtttcaaaccagtgcaaatacccagaaggtcccctggccagggggcctgtggagagccatgtcattcccagaaaccttgtctagtaaagatggtagtgggtttaaaataagggtgtacatcaccagtcaaggtcaagtgttggttttgtcagcatataataacctcctgagttaataagaaatagaaatgcaacttccaaagtgcattgtaaggtttttaaacctctttttagacagaaggctgccagtgatttcctaggatttgactagaaagtgtaaacttcagataatactgaatatagcccaatacactttttattcatggtgaaatatttgaaagaaacctccattctttaaagcataacttcagtgcagtgtgatgttgtctctttttcccaggaaaaatttaataaaaatataaccacacattgaaagacttaaaaattagcaaagaaatatagcccagataaagaaactctccaaactgaatgtagggcagcctaacccagaaactaaggccactactatgacatagggcctggaatttaccagcttacaaggccataagataactgggtaccaagaattcccagatggccaccctccccgaggagctcatggaggaaacagattgccccactggccaatgtgtcaataattaacaattaagggtccctatgaaacaaagagatagctaccatttgctgaagcaagataagcatatcctgaggtctgcaggttttacaactggtgggtcaggaggccatctgattcccagccctctcctcaagacaaaggagttcctcctaggaactcatgactctggtcacacccctccctaagcttgtggttttgcctttaaaaacacctgtgcctgggggacagggctgctctctagcctgcctgctgagagagactgtttgtacaaatgtccacctttcattaaagccccttgctgtttgcatcaagtttctgcctcctcatggtgagtggggtggctgcagtcctgggaaaagattctggaggcctgagcttctgggggtcttacaacatgtattattcctttctaaaattatttttttggatcacccttgaattgtttctttttgtttaacacttatttttaaaatatgtgtgtatgataaaaagaaaagtttaacttttcagtagaaggatacggaaaacttgtatgtgaaaaaacttggtaaagtgtttgtatgctgattacatggtattttacatattgttagtagtcctctcattaaaatttgaaactaatgatcaatattaattgataaaagcactattgaaagtgatgaattgataaacagcctgccctaaccacttcagcaatggggccaagagggatgatttcactagctgcattaaacttaaagatatcaataataatttttattagttttgaattctgagcccttagcattgagtcattctttcattgacttggctcctttgtgttttcttcagtacaatttaaacccaaaacaatgctactagatcaattcaaatatagattttgggtaggatcattttctcaggtaagagaattattcaagtcattgttaacctacatacaaaacaaacaaagcattttgaaagatatttaatgtgtctcagtgaattgaaaatcaactagcagatgaggagcttcctaacacaggttttatctccttaaaattcctatttgcttaagcatcttatcaaaaagttcatttctcctcaagaagtttataaattctgttgtataaaaagatcctgttccagatatttaagatgtaaaaatcatctttatgttacactgtgttattacaaaagccatgtcatgctacgaatgatatagatgtgttatctaattcacatgtccttttttattcctttattatatatagcatgtgaaaacaatcaggagaagttttcctgagacaagggagagggcactgtgtaaacttagggcatgcccagtgcccatattaaaaagccaggtgcaaggacatgcatttgtattcccagcactggaaggcatgacaggttgatctttgaagcttgttggccaggcagactagccaaaccattgaactaaagtctactgggagacactatcttaaaaaatgaggtagagagaagctgagggaatagtgattgaagaagacctctggtcgccacaggtatgtacgcactctttcatgcacacctattcacaagtattcataacaagcatgtatacacacacattatgtacacacacaccctcttaaacacacaccaatattactatggaggatccccttttaggagtattaagatatgattgaagatgataacgacaaatgttttaaagtctgtcaatgaaaacaaccaaagattagattaagtcttattctaataattaagagtgaattcagcattcttaaatatgtaaatattcatttgagtgctagaactatatccaaaaggaacaattggccctcttgcgggcaaataccaaatgtgagcaggcagccttagggcttaaggacaccttgttatgtttccctataaaaaaacaagtcacccattattgatgacattggccattccacagtgaaggggttgctttgatgaaataataatgtatacaaaccaatggagaagagattaaaatatttattttattttaaacttcagcatgttacttcagaaaaaaatacacacaaaaatgactgtgattgtacctatgtgtatgagtctcattattgtaaaaagaggagggagtgttgaatcctgtgcctgtgtcaaatactgtactgttctgaaaatgcaacacattaatttagagtgaaaagaaatactatggacctatatttaaagggggctgttattttacatgagttgtagataatcatatttaagtgtatattcactttttgaaacaaagacttttatgtacatgcatgtgtgtaagcacacacgtgtgtgtgtgtgtgtgtgtgtgtgtgggtgtgtgtgtgtgtgtgtgtgtgtgtgtgtgcgcgtgcgtgtgtttatgcttgtagaagccagactagtcactggattttctactgcattttctcaagctgagtaactgacaattgtgagttttcagatgtgggtgaaccaatacctaacctctgaatcattgatccaaaccctgtgtacagtcactttttaatggtgtttcaaggtaggtttaaaggagtccacaagacccagataaatgattaacaggtatttattagggaagtacttacacaattaatagtaaatagctgccacggtcttcctgctcctgaagatgcagtctttgtccttctggaactacctttgagagagtgccaacccctcctcttccttataaggggtcacatctgcacgcctgaagccatgcccctaggatatgtccaccaccacaaggccactggtgaaacaagttgccactggaggtgtttgctgtgtaaatgtttacttcataatagttttatctcatattcattgaaatttcaaatagttacttattggtttcccaaataaatgtgcagagaaattacatagtgtaggattcacaatgtaacaaatcagaagacacttgtgtgtcattttgaaagaaaatcattaagttaatcaataataaatcatagtaactcattttcatctctcttagtagcagtcacgatgtctcaataatcttaaataactataaaacaatgcttataaatgaaatattataattttaacattttaatatgtcaaagtgcagaaatcatattatgtttttcatgttttttcaacaattttaaaaattgccacacaaagtaatagatttccgtatgggattttcatacatatttctttttggttggttccacgctcccatttccttcctccactctactaatcacccctagttttccttctttcaatttagttctattgctttccccaaagccttccttaagctttctttttcagttacatggactcccatctagtttcttggtttttaccgtatctacaaccacctgcatgcatatagttaagttggaggctaagacccacacatgagagagaacactgtctacttttcttcctgaacctaggtcacttccctgaacagtttcttttccaataccatctgttttccaggcattttcagaaattcactttttatataactgaataaaatcctattgcatacataagaaacatttttattatctactagtctgatggtagacatctaggctgatcccattcctttgttattgtaaaaagggtattattacatgaatgcgtgtatacacgccatttacatgctttttaaagagtgagttcctgtttgttaatacaacctcatacaagcaataacccactgaattatcaggaacctttcacagttcctactattggggaatcatatatgaattaataaaactaacatgtgcaagaatgttatagtttgattaaatgaaaaagaagtattttctcacctgtggaaaatttgatgaaatctagaacacatattcctattttatgtcactcacacttatctgtataatgccatttggctaccatttaacttcctaatttttgcatgtattttgagaaatttattatatagtatgtgtgcatacatactgacccacaaccataaaattattttcattgctatttcataactgtttttactactgttatgaatcataatgtaaatatctgtgttttctgatggtcctacgtgacccttatacaaaggttgttcaacccccaaaggtttcatgacccacaggtttagaaacactgacttatactttagtttttattttatacctcagctcaagttcatgagcagaagcagtgaactgcagatgataccagcagaaaacaaatttgtagaatttgtatgagtatgaagaggattcaagggaggctagacaacagacttcagaaattttccacaaaccacctcttcatgttcgatttctgcaccatcatcatgtcttagcttacatatatgctttcttcaaattcaaagcctaagaacagtgtatcacctgcctttagtgactacagaaaaaaaaattagttatctcagttccaatattgtgggtgatggagccttgacttccaaagctgcttatttcacatggcttttgtgtgcatgcttaaatgatccaagtagatgaaactaaatttctgagaggtatgtttggtgttttttttttaaatttatattgtaaatgtaataaggttttggatctgtatgtttttctgcttaaaaataatgttggttagacatcaccaaacccatgttccactttctgatttctagttaatcagagtcatttacaggctataaacattaagggaaaattttcaaaatagaattcagaaggagttgtttcacaatatatattataaataaagaactttatacttaaaatttatacattaaaaagctttagaaatcattttaagacatttttgtctcaaataatataaaaaattttaagtcactggaaattattttgataaggtatttgttaaaatatttcacctagccagagtgaaaattacataacaattacctgaaaatatttttataaaatctatattaaacttttgctatacaaaacaaaaagtgcttagcacacctaatattctatgtactttgtagtccggattatgatgggttttcacggtgttgtaacttgcagattttcctcttcaaatgtaattaataagaataactaatctcagcttttcttaagtcatgggaaaaaagaaaaattataatatattgcagtacatatgtatgcatgtatatgtatgtatatattcatctgtccaatatgtataggtgagagtctatgattttttagaaagtcactgaaagtcttggcacagatccctgtcaagagaaaacccacagtgttatttatttgaagatggctaatgtgcttgtatagagaactaagtacaggacagctctcttttaagactaaaatttcatgtttctgaagctcaattcaaataattattcttatgctccctgggactactataatcagagaattcagcacatgtaacaaaatagcattaatcacagggatcaatcaacaaacagggtgagagtaaaattctctctcacagcttgagagaatcctaaagaagtgtgtgacaccatccatgagccaaagacattagtcctaattcagagttaaaagtttattgtgagaaagaactagaaaacaagtccaaggcattcataagcagtacatatgatgtattggggactctctcatagacattaggaaataccaagtaacaaaaaagatgaatgtgtgcagtgcttacttcaagatcacgagtatcacttgatttatacagcccaactcaaggacagatagcactcccaaaataggagtctgatgggaataataattctgctaatctgtgtggcttatgcatagacaaacaccccctaaaatatgttgttgagatacacattttattatcagtggtcaaggctgcaaccgcaggtattagcttttcattttttaaattttaggaagtagacctgattttatttgtctgaaaactacaatgagctagcattttgaaactggcatattttgttcattaattttgatatctgtgggcatctcccactgaaagatgctgcttcatataatgcacgagtatggcattctttttgataaatgcacttgtagcgaagacacaggcaggagggaaaaattttttactgaatgacaaattcttttgtctttacatcattcatttgaaaaaaataaaaataaaagctccttggagtaaaatacagtcttaaaggggttattatttctcctcaagtagctcttaaaattatcacgtcaagttgtaatctcttggagaagttttatgttttgatgcaatagtaaaagagaagaaaagaaaaagagatgtttcctcatttctttgaggatcctggccatattttccttcatggagtgagagctcagacaggcagaagttactggtaccccattgtctccttgaaaataatgtttgactggaatgtattgcatagtttataaaatattcccagtgtattaagactaagacccattctgtgaaatcaatttcattggaactcagaacattcaatttggagtcagtatttagggtttaatgtcttctatatcctcacaactgaaatctaggcttgacatgaatgttcaaagataatctggacattgtaataaatgcctgccatcctagcacggaagtcagaagataaccaggacagccttgtctgcaagatcctgtatcaaactaaaggagcaggtggaggaggagaaaagaatcagtggatggatattaatcagtattttctgcaagtctaaaattatactaaacattatttgcaactttttcttttttgggtttttgagacaaagtttctctctgtagccttggctgtcctagaactagatctgcagaccaggatggctgtgaaccctcagagatttgcctgatctgcctctcaagtgctgggattaaaggcaatgtgtgcaccaccactgcctggccattatttgcatatgaatattgaaaaactttcataaacattactgaaatctatcttgtgtgggtagaatagaaaataaactaacctctacttaagataatcctaaaaggcttaaacaatgtgcccataaacaattacatggggcattcctcagagaaatcatcagaggttgcacaggagcccagtggtgttaccatgtctccatggcaaggtatggggaatagggaaatgatacaagaaagaaatgtcattctagttgtgaatgtcactccaagggaatgcagctatctctctatcccctttccatctgctgtgaggtttgggttttccattgatcagaccatactagagaccagtaatgttactcattagctcagccttggagaggcagagaaaaggatgcaaagtaggaaagagctgagatggaggctcaaatgataatctagcttgtaaacccccatgttaagttctgttctagattcttaccctgttgtctggtaacaaatgtactttttaaaaatattatattataaagtaaagcattcacattacaaagatttgtggaaatcttgaatttgactaaacagataaccagataagaatagcagataagaaaaaaaaaagaatagcagataagagattaactatgagccaaagcataggtgtgtgtggtgtgtgtgtgtgtgtgtgtgtgtgtgtgtgtgtgtgtgtgtgtgtgtgtgtgtgtgagttctacattttaaagatctttagtcagaatgactagaatagaaacatgacaacaaatgctagtgtggatgtgaggagaaggggacatttattcacagttggtgggagtgaaaactggtgcaggcacgatgaaaactactatgcagttcctccaaatgctaaaaatagttttaccacatgatcaagctatatcactgtactagttacttttctattactgtgatcaaatgccataaccaaggcacttataaaagaaagttttcaattgggcttccaatttcaggggattaggatccacaaagacagagtgaaggcatggcagccggaagagctgagagcttgaaatctccaaccagaagcaagtggtaaagagtgaactgaaggtgacctgagattcttaaacctcaagctttctgccagtgatacccatctccctaaaagaccacacatcctaacctttttccaaactggaaccaaggaccaagtagtcaaatgcccaagaattatgagcgacatctcatccaaatgagcacagccactcttgcttgatagactccacgctgtacaaaagtatactagctctttcatgttgatttctactttatgctcaaaagccagaaaatggaaccaacctaggtgtctaataactcatgagtggatactgaaactgttatacacatacacaatggaacgttgttcaactgcaaagaaaaatgaaacgtgtagggagaaaaagggatggagctggaaataactattctgaatgaggcaacctatacccagaagtacaaacctcatatgctcactcttactcatggatgtcagatttgaatctttagttatgcatgcttagactgttgaaaccagaaggcaggaaaatggcaaagggaggaatccaggtgatataaagagagaaaggaaatcattgaagaggaatggtaaatgggggagaatgggggtgaatggcagaggaggaggtgagtgaggggttacagattctaagttagtaaatcttatatttctttacttatcattcaaccaaaactaatgtaagtctctggtatgttgaccttctaggcctcttatactttggtaattctgtgtagataacaggcattaaggaaagcaaatttctataaacaaagcaaggccacttaaagactgatttgatggaacttctttttttctttctttctgtttattcttttgaagggaccagcttcccttttggcagccataatggctgaacacgtgcttctatgaccttgtcctagacactagaaagtcaaatgcctgcctcgtgacaaggaaccaatcagaagttagctggtggcgatatgctttacagacaagcgcacagcaatgacacacaaagcatagcaaccaccctgggagggcctatgggccataacaaccaattggccaatcaacacagggcaagccctccaagcctggaggcactccaatagtgagcctgtgcgtacccctagatactccccttacgctgccctataagatctcttgggaggccctaggagctgtcttttgctagccatccgccatggcgggtgggtgaaagacccgagctaacatagggttagctcgttaaattacaataaagcctcgtgcagtttgcagcaagctctcgaatcagcctggtgattggggtgactgaagtcgtggcctgggaccctggatacctgagttttccgggggtctaatactttgtgtcttatacatcatgtctcccgatcctacccatatccccagaatgaaacaaagaaaaatttaagagaaaaaaaaaaaaaaaaggagaaaggaaaaaaatctcatcatggaagctgcaatatgatacagagtgagtcatgcagtaaacctctttattccacacgcttttacatgcaggcttcactgcaaacaatcattggtctggtttgagacccctggtctctgatacacttctgaggacattgggccctcgttgggactcttcctggacattccattgctgcccagtatggtggagatcctacagccccgggtctgtagaaccaaccttccccacccttcccatcctctgtgctccagcaaatcacagatggattgggcgaacatgtaaccctggctctgggcctgaatagttgcagggttgggcaggctgccagctctcctgtgtcatcaccaccggggtgagatttctagcagcattaccctggctagttcacctcttgcagccatgagcaaggggtggatcagttctcccactttcacatcctcaggttcggttctcccccacctgagcctttaagaccagttctactggcattgcccagtgagggtgtaggggccactctcctgagcgctgcagctgatgaggagcaaggccagttctcccttgtgactgcagggccagctcttccacctgcccctggagatgataggggaggggagtgcatatcttccctgtccatgctgccacatgacagatgagtaatggggacagctctcccatgctcacatcagggctgcctcacccacaccttcatcaacagagtcagttctacattgctgccctggaaaggtacagggcccactttcctgagtgctacagatagtaagagggagggtactttgccttgtctgtcacaggtggtgaagggcaagggataagggagacatctctcttcctacccacaccaccacatgacagatgagtagagtgttatggatagttctcccaagttaacaacttcaaggctgtctcacccatacctttaccaacagtgttggctctctcatgatgcccaggtgaggtgcagggccggttctccctaagtgatgcagctggtgggaggcagggacagctctttcactcttatgacctcagtcagggccagctcttccaccttccccgggcattgatggggttggggagggacttctcttccccacccattcagccatataacagatgagtggtcaggctaggtctcccatgctcacattctaggttagctcatctgtaccctcatcagcaggatcagaggagattcagggcccactttcttgagtgctgcaactgggaaactccctcacaagctggagttgggagggacaagtgggaagggcatcttttcccccattcccaccactgtatgcaggcaagggaggtgtaccagccctgcccctctcataccctcagggctgtctcacccacaccatccatgtttgcacagtcaaccttactgtgctggctaggcatggttcagggtcctttctccccttgctgcagctggtgaggggttgtgatggaactacttaagtgcaaggtcagttattcaaatcaattgccatttacagagaaataggccatttcctttccctctctatttacagcagctgccttgatctgtgttagaaagaaatcaccatttcaaggaactgctatgtttatggctttatttttttttaagacaaacatgctgaattatttggacggcataacttcagaaggttggaagatccatcaaattgcaaatttctcaaggtcaggaaatcatggtctctattttgctggaaactttatatgagcctattaaaagcttctaaacagagcagttactttgtgcatgaagtttcaggtcccacatttaggttaaatacttatcttactgtcagggctatggcaattgaattgggctataccttatattttctgcacatattaaaacaccaagcttacattgccaaatgcttcatcctgattatatatgcccatttaaaatggggttcaatctttctctttcttatagtgttcagctataataacatggccattaaatttgtagaaaacatatttttagacactccaatgctatatatttttcctgcagaacagctttaagacaatatggctgaattgtctttatccccaaggcttaatttattattggatttagaatagtgattaaattgaacattctacacccatgagtggtctctgagaacaaaagctggagtaaaaaactcccaatgtatctcagaacaagtgagccacttgtagacacatgatgtctaagctcaaatgtcatctgcttaaaagtatttcaaatcctggaacacaaaacccttaaaaactccaaaccaactgattacagagctttgaaaggattcctatttactatagaaaaacatgatgatgatttttatggcacactgactttgtttcagtgatgtatggatttaatatcaagactgtagactcggagtaacaaaatatctcatccctttgctctagaactagatgtattaggcagttgcctttcagggtgttttgtttttctttgtttggtttgtttttcatgttggtgctgcgtgttgaacattcacctcacagaagtgctcacagctgagctatatccagctcatctctcctgagaaatgaactgaagaaaagagtcctcatggttcatggagaacacagagaaggggacaggggtccagaagccatctgtgacattcctggaaaggaaatgcctcactaaatcttctcctgccacaaccagaaaaacagttaagggaacacacagcattctggaagaaagaatgcagcctttgtgatgcctgtccactttccacttgattaaagttctttgtcaaatatgattcaggtttaaatgctatagggatgtgctccatgcaccccaaacagaagggatataattatacctaattaccataactcatctagccagaagttctccatgacttgcttgagtgtacgcaatgtcatttcagcaatgaaaaagaacattattttctaagaaaaccaaccttataatccatgtatttaataggctaaactacttggaaagaacattgattcttgtttcatagtaaaacaggcctctcctcctcacagtcaatgtttaaggacacaagagagtttcatgtaacaagatgtgtatggtcacctacaagtaactttagaattctcctgcatcaagaaattcttttatttttattcaaggaattacctcagaaatacttaaacagtagatggaaattccagaattttatttatggatctggctgtaatctccttttgttgtttggaactgtgaagtttcccttacaatctgtgatttacaaaaaaagaaaaaaagtagaaacatgacctacagacattttcctttgtacttagaaaatatcctatttaaaatgagtaaaattttaaagccacaagagacagaaatacacgttaccccaggggaaacctgcattgttcttacattgtagttattagaataaaagaataaaatgacaataaaagacagtcaaacatggggaaatatattgtacccatggaaatgagctacatattaaaattaaaacaggtagaaatttctacttttgagtatatcatttaaaaataaatagtactttgcattgcaagacacaatgcagatagatgtggaatgtatgaaattaaaatgaaaatttgagtcgggctagggagatagttcagtcaataaagtgcttgctaggcaaacatgaggacccgagtttcaatgctcagaacccatacaaaagctgtgcacagaggcaagcttatgcaattacagacattgggaggcagagacgggtgaattcaacatgtctccccactttccatttatgtgtgtacgtacatattcatgtgtgtcagtgagggtgcatgtgtgtgtatgttgggaggggtacatatgcatatatgagcatgtatgtagagattggggacaacattaaatgctagtctttcagggcacagtattccagttacctttctaaataaagtacttttgtacagaatgttacaagagttctgtaactatgtttagaaccctcttttaatctgagtaatgttatcaaactgtgggggaccgattatgtggggtcccaggttctggctgtcagcagctgtggtgccagaaaactctggcccactattgtattgttaattaacaccaggctgcaactttacctggcctgatgggaatgtgcctcttattttgcatctgtatgtgcctaagcatctgaataggcccttacctggaaggaggggctgggggtatgttgagtgaggacagagaggaatgaagctggagagggccagagggagagaggaggacaaagagagaaatggttgctttgtagtgttagcatggtggttaagggacaccagaaaagatgattaataaaggaatggctctagttccacagcatggaactgagagctctctgaagatgacaagatgcctgtgtttggtcgttatcgccgttgggttactagcagcttccaagtccacacacccccactcaggtagaacctcatggctgtcgtgggttaaagctgagacaagcggggccacgacatcaaacatttcttaatatcatttaagcatcactattctttgacttataatactcatctcttttataattaaaagattttttatctttttgggagaaataaatttactgttgttggtatttagagtgcttctaatttttattttaaatactttttcttgaaattacttcctttgaagtaaaattacgtttatagcctaaagtacattgtaaagcacattgatttcgctgtcctcaaaatgcttatactatgtatctgctcattgtattttattaatttttttaaattatcaactaattcaagaatgaatctttatcctaaaatagcatgcttatgctaagagtgtatgttgggtaaaggaaaacatactttgtaagcatcaaagtagtacaagacacagaagagtgagtgaaaaatgttaaatttctactaatatctaagttaagaagcaaatgtaaataaaattaagagaaaatattcatatatgcaaggtatatggcaataagagtgctaaaatgaaagaaccttacaattcttaaagaaaatgaagaaagaacaagctctggctgcccaagcatgaacttctgagttggatccacagaaccatgtaaaatgttggacacagtgcacatgcttgttatcccagcactggagaggaaaaaaaaaaaaaaaaaaataggtggttaggtgggtctccattcagttttagactactttgagagcctcaaccctcagtgatgtactctgtcacaaacaaacaagcaacaaaaaaaagttctaattttgaggaagctcgatttcattttatagatcttggttttaatgtcacagctgagaaatgtttgtttagctcaaagtagctatcataacttttacaggaatcctttgtagttgcagttctgaggttcattcttagttaatttttacatatggtttaaggcatagatcactagttgcttattactatcgtattattctatcatcattcattgatgatgatagctttcttcccaagaagttggttttatagtttttatgaaaatcaattgttagtatttatgtgggtctatttctggatgctttcatctaattcactgatctgtctctctttaagaaaatatgcaggtgtcttgataactgaaaaattcagtgtccttcaattgaggagaattagtcctcaggtttcattttgtatttttaatttttcttggttaatgcatatagtgtacatgcttatgattcttaaattttctaattgtgaaaagttcttgattttagttgtgattccttggaatctaggaattatgtgaaggaagattaaggcattgcatattaattacttttgaggggtttgaatcaactcaatgcttccttagtgaccatactatttatggttggcattgtttagagaacccaagatatcccagtaagtaaaaagcacaaaatcccatcctttgtggccttagcactgtagctgggtaagcagtgatggtagcttagtttccatttctgttcctgtgataaaaacttcctgatgaaagtgacttctgaaatatgcggtttgttttaattcatgtcagagcagggaaattggggcagcagaaacatgaagctgatggtcacacacacagccaagagtagacagagaaggaacacattcatgcttgctgctcagcccattcttctctttccattcagtctcgtacccacacagtccgtgaaatgctcctgcccacatccagggtgagttgtcctacctaccttgatgaacccagctaagcaaacccctccctggcatccccaacagccaacaaatccacacggttaccatcaagacttcttcccaggtgattaaaggatttgctgagttgacagttaggccaaacatcccaaatgggaatcagttattgacattataaataatagttatataatatactagaaggggtaaatttggtggtgaaaactagaacgagagaaggagctatgatgtcagtcatggatgcagattaaaaaggggtcttggggagacatgatgaagaaagtgacatttggacaaaaatttgatgaaagtagtatagttgccatggaaatatctggaagaaaaggtttcaaggtagaaggggagatgtgcgctcagtgtgcacagtaatatttgaaaaggaatgttacccttctttttatttagacagaaaagaggagataatttgggaggtccttctgtgtatatgtttgtcttattggatgataaataaagtactgttggccaatagggaagaaaattaggcgggactaggagtcgaggaggattctgggaaatatagtaaagagaagtcttgtgatccaggcaggaagtaacatagcaggcggactcagaatataatcaggacaaacaggaaatcacttgcttcctcctcctctcttctctgtggagtcatcatgtgatcccagcaagagaagacgcctgccactggtgtccttgataagataagtctttataaaatatatagattaatagttatggttgatacttaagatagagctagcaattaagaaatcctagtcattggccagcagcattgtacctaatataagtctctgtgtgttattttgggtgtccacatggcattggggcttgggcagcagacagaaagatttatcattacgataaaaggtttcaacacagaaggggagatgtgtgcacaggaatatttgaaaaggagaactctgtggctatggaggtgaggtgagagagaatagacacccttcaaaacacatccatcccttaagaactttggcttttgatggtcaatgaaggggtatacagtaatacagtagaaagagaaatccaagaaacacatgtggaaccaaagatgaataaagaatgataagggaacatttgctcccagctctcacagctggatgctaacagcaacctctctagaaagtttcaaatgaaatgattacaatacagacaagtgatgtagatgtccatatactaagagagatgccagcaaaaaatatctttttagatgcacctatgttttaaagagcaaaagtacaggggctggctgcaaggtggctagtaggtaaagtgcttactgcacatgcataggacaggagcttggtttgtcagttctgtattggctgggtgggtggcctgcctgcaatcccagcactggggagacaaaggcaggggatctctggagcaagctggctatccagatgatctgtaacagcagctcaaggtgcagctagggagggacactgtataagatggagatcgaggaagttacccatgtccctcttaggcctccacacacatgcacacacacctgcacactcaggtgtactcacatacatgcaaacacacaaacatacatgcaaagcatccttttatacatatgcaaaagaatataggtccaaattcaatgatgtatattacattaatatggaatacattatttacaaattatagccaattttactagtgcctttcacatgctgttatcacattaaataggactgctccacaaacagagaaaatggttcaggatagatgtttcctcagcacagtggtcctgctcattgaattcagacttgcaaggctgattgtgtgaagggatcaatgaggaatgagagctccatccgatgaactgatggaggcaaaggcatgtaaagatatgtcagtgacttactggggcaagacctggagtagtgtattgtgctcaggcaatgacaacagtctcagctgagagactgtggagttaggaagcaatcaaccatggagttaattcattttagaaaaatctgtgttttgctaacagaaaaaaaaaaatgacattatgttcaaaagtaggacatctaactgaaaatccaagactgtaatcatagaaaataatctcttggcatagcattctggaggtgacactgggttaataattatagttatgccattagtccatctgcatgcataagcagaaatgttttgtaagaagaatttaaattatgaaaagacctcaaattctaatgttacgccattatagctagttccccatacttctaataagcatgttatccactaagcaactatgcaacattttcatttcaagaacttcaagggcaataaataaaaaggtgcagatgtgtgttctggagctgctcatgaaatattaaattgggtggttttccatgtgaaatgtaatcagtatgatttccaagcattttggcattttacactttggtgttcaaatttacatctggcatatcctgattaacatgaaaactttgtaatttcacagttaaaaaaattcacggctatgtgtgagaagtctctgaaccaggtaatgtaattctctgaatctagtcaaggttgttattttttgtataccatgtgtgtcattagacacattttaaaagtaagctttctactcatgaaggaaaaagaataaaattcaaaacttagatgtggagagctgtttatggattggtttttattgctaatctatccacaaataaaacaactgtgctcagaaaaagcatctaaacagtgattcctcctcccatttaatgtctctctaactcaaagcccaaataaccacaaaataaaactataaatttaatatgaccataatgttaaaagtctctaaagctgagagtttctcttctgcccagaataccaacaggcttagtatgttggtattgttgtatatatgttgtctaatgataattaaatgtgtatttttctttcttgacattttaaattaggtcaagtcttataataaataaaaaagcatatattatggtcacacatcccataagatgagtggatcactttatattttaagctagtagaaaataattggaacattgacaaagctgagacagcctaagataccaaaaagaggagtgctaaaataacatatataacacagaaatgtcagagaaatacttctagtcttcttcagacatgctattcagtgtataaatgagagaaagtgctatctggtgggtatcagaggtaaactttcctaacaaacttgttattgcacaggaaactaaacattatgttcacttagattcttcagattctttgaaagttcaacttctatgcttttaagtcaaatatttctgccctaccttgcatcttttgaaaaatgaaactggaatagtttagccttttttgcctttagaggaatcaaaatcaatgttatcatagtgaagagtttgtttatttgtttgtcgtattttttttttttgagacagggtttctctgtgtaacagtgctggctatcctggaattacctctgtaaaccaagctggcttcaaactcacagagatctgcctgcctctgcctcccaaattctgggattaaaggcatgcaccaacactgcctgactactaaagaggttttaaagccattttctacttttcatttctgttgtcgtgataaaatactcaggaaaaaagcaacttaaaagagaaagggcttatttggcaggttacaattcatcactacaggaaaagtcatagtggcaggcgctggaggcaactagtcatattataaccgcagtcaagaatagagaaaaataaatgcatgcatgcttacatgtgctcaaacccatctttccttgcctagggaatggttccacccacagtgggttgtgtcttcccacatcaattaactagtacttaagacaatcccccatagacttgcccataggccaacctaattgaacatatacaaaaagtattcatagcctggagttcaagtttttgattcaatcaactatagataagaactacatcagatttaaatcaaccccccccacacactcctcaatgagtttctacaaatgtcagctggattgaacattatgctttatgctaaagtaaaaattggtttaatgtaaggctagagagatggctcagaagtaaatgcccttgctcctctatcagagagtcaggattcagttcccaacatccacatgtttgctcagaaccatccataagtccatttctagagatctattgaaccttttgtctttgtagtcaccaagacacatacatggcacacataattccatgaaggcaaacactgagacatataaagtaaaaataagtaagtttctttttaagaaatggttatcaagtcttcagagggttaatgtattgaagatgatgttccttgtcatggagtgacatagaaactggtctgagacagccattattacacagtggtgctcagtagaaatcaaggagaaaggcatccttacaagtataaggaattcaaactgaatcctaatgtgtctgaaaagaagttattggagttttaaaggtatgtaattttcatactaacttaaacatacattgagtaaactgggggcttttaaaaattatcatctgaccaaaggataaatatgttaaatttatttctagtaatagacaagattgaagaactaaaacaaaagttcattatcagataaaatagaagtttaccacattatcaatgagacaggtaacagagtagctgagactgaaacttataatagctatcaagaacaactttatgaatgaaaatcaactttatgaatgggcataggtcatatggtcaaacagattagataatgtggctcaaagtccctcattcaattaaaggtcatctaattttaaaatagtttcaaagattaaattgctagaaatgacaagtgataaaagtcttaatatggctgggcatggtggctaatgcctttaatcccagcattcaggaggcagaggcaggcagatctctgtgagtttggtttacaaaagctagttccaggacatcctccaaagccacagaggaacccggtctcgaaaaacaaaaaacaaaaaacaaaaaaaagttttaatatgaattttgataatattacttgccttattaaaacaaagaaatagatatcctgagctgcttctaattgttttattatctcttgtttaattctcctcaacataccactgggagatggtttctctataaggggtactattaaaacaacgtggtagaaaggttggatcgtataaattaacaagcaagaagataacagttgatcacatttaaaactttatatattgataagcacaggagttactcaaagtattcacatgggatatttaacaggggggggttattgcttataaaagctctgttagctacagttacagaacagtagttgcaagcatactgctaaattatctctaagaacagtttcaattaaaactgtattgtttggatatgccatttgtttttcctatgtattagttacttttctattcctgtgataaaatgccatgaccaagcaaaccttcagaagagagagtgtatttgtgattaggttaggattcacaacagcaatgacagcatgataacaggtggcagacatgacaagtggagttggaagctaaggactcacatggtttttgtttgttgtttgtttgtcttgttgttgttctctctctttgaggggtcttttttgagatagggtttctctatttagccctggatctcctggtactctttctgtataccaggttggcctcaaactcagaggtccctcagtctctccctccctagctccctagggctgggattaaagactaaagttgtatgcctaccacacccagaattaagactcattttgaaaagccaagcaggaaaagttaactaacaaggctgcaagcctttaagttctcaaaggctgctctcaatgtcatagttcttctagcaagacaactccttaactgcccaaacagtgccaccaactggggaccaagtgttcaagtaactgagattaaagaggacatcttattctaactatcataccctgtattttagttttatcatgtttattctgtatgtagaacatgttacatatgagtaaggaatctgatgtgaacataataggaatagtggaggaatgaccacaaagagacaaaagcagaaattccactagtacacaaaacttttccgtaccttaaccttattggttaaatgatgcatgtgataaattacacaacattatacatgcatacacacaccacatacatacacccacacatgcataatacacacatacacacaatcaaaacatatgtaatacacaacacaatatagcacacatacacacatacaatacacacagcatacacacaattgctgaaatagaaataaacttgcaacatgttatatggccagtttccagattgtactgtcatattataaattatgatcattggacaaagattgataaggagcacctgaattaattcctgtaattataatgaatctaccatttcatgttgacagaagtttctttcccacccagtcctgcagctatttagtcccaaataaacaaacagagacttatattaattataaactctttggcccattgctcaggctacatccagcatgtccattggccaagacagttttatccatcaaccaataaaagaaacatatattcacagcatacaaaaggacatctcccattatctcctcttctctatttaaataaaaaggaaagttttaattttaacataggaaaattatatataacaaaacagttatcaagcaagaactatagttaaaaacaatatttagtccactaacatttggcaaaattaaaagaaaatattctatcatctatcctttgtaattttaaagttttatatgtaacttatcttttatcataactaaagaaaaaccataactatatgtcttcaactctatcaaagacaccaggaagataatatagaaattctaaagttgacagagacatctgcctgcctggacagtcacccaaagttcctctgtaacttggggcatacttctttagcctataggcccagaatgtctagcaaactttttgatgaagcaggaaatttgaagatctatattggcaaagttcactagatgctttcttctataagcaggaactctgaaagaccaccctgtctcttggcaagttcagcagtactttactttgtaaactgcttgtccagtttgaacagtgtgcttactgtcaacaattgagacaagagcagttctttgcccaataagccagttttgccacattgaaggcaaaccccataatgagtttctttgatgcccatcttcctctctgatgtaattggtattgccaggagcaattgtgtctcattgttatgaacaaccctaataaaccattttaaatgccatattctgtgagtctttgaaaggtatttaagactacctattcatttgaaatatatctctgaatatctagaaaatccaaccaacataactataagttttgactattataggtgactatctacaatctgtatttaattatacattacattttcaaaaaagctgtacaaacacaatacctaaacaagagtaggaatatacatataacaaaattgaccttaaatttgtataaataaacccaaatgcaaagtattcatttctgtatcgtttccttttttgtttcagaagggaatgactgtgattattaaccatttataaccaacacagtttaaatgaaaacaaacatttacaaacaatatttggaaatgtgggcatagttctcttcaaaatgcttccttctgtttgaagacactgtcaatcttaaggggatcctgagaaaactaagaacccttcccaaatcctggctgtagtggtttgtgagactgcatggtctcagccatttttggatgctggattacctgggccactgtttcaggggatcttgcttgatcgaactgtattagtcctgaaggaatccacagcttttcaacttctgtggaaagaaaagcagaacctctttttcaaagtaacatgtccttaggcttaaattttgaagtcaagtcattttcaaaatacataggttggattaatccagcaaagcagttacaattcagtgtgttttagcagctgttactccttccttagcaatcaaaaaatttaaagacacatgatagcataaagtatccagactccctgtgtatttttcatctttacatggctttttaattattttatttcttttagttttatttgtttcatctcttgatacagggtttctctgtatctttggctgtcctggaactcattttgtacaccaggatggccttgaaatcatagccatctgtttgctctgcctcctaaatgctaggattaaaggcctacactaccacacccagctactctattttttaaaggacattttctttccttttttcttttctctccccagcctacatatatttttaaacacattgtatactgtttagagttttttttttcccctatgaatctgtgtttacctgtatctctatctttttctgaccacatgagtctttaatcttctaaacaggattgctgagattaaagtggaatttttggctgctggcttcattcagttaggctttccagcatggcaggaatatgtttacaatcagctctgggagctgtgttcaccacctcagctctggtctatgacaccatcaggcagcttgtagcacactgctacttttttgtctgtatgagtaaaagctaaatcttccttgcagcatgctgtatggcttggagacagcctctgtataccatagaaggaatccaccatgctgtggtcaaacccaactgccatagcatctctacaccatcgcctgcatgaaactgtgagactaggaaatcccagtgcagctctgtttctgtgtgttcagaaccctttttaagcttttgtcaggttttatgtggaaattcttgtcaaacctttgggcaccacatatagatggaaatttttttcctgcccaagtcccacagccatttagtcccaaataaacacacagagacttacattaattataaactgtttggctcaggaatattactaacaaactcttacaacttaagttaacccatattcttatctatatttagctacatgataccttttctcagtagtaaggcattttcatcttgcttcctcttcatttgaccggcagctgcgtatctctagagactcactctctgcatcctcttcccagctttctcctatttaggtagccctgcctatacttcctacctggctacattttgcctgtccattagccaaagcagctttatacatcaaccaataagagcaacatatattcacaggatacaaaaaaaaaaaaaaaaaccatcatcttcaaaataaaagatctttaaaaaaaggacttttatgataaaagtaatttggtcaggtgagaaaggaactttcagagacggtgggaacaatcaaggcaaagaggcaggtacatcaagacaaactgtattgagatatgcctactgtgataattttagcaataatgttctgatccattataaacacaatgttttaatttcacagtcaatcattcattagtgtgtgtgtcccacttgtagctaggacaccttgaaacgcaacagcagtgtcagaatctgctcttgagatgttggacagtgatggaaactaacctcttcctgaagaacctcttcaactcatacatgatttacagattgaaatattgtactcatcatggatcagaatattattgttgaaattgtcccagtaggcatctacctagaagacttgactcccaatgtagtttgtctgtttcaacatacattttgtctaacttctgtcttgcttttttgactcttgatttttttcaacaatataataaggaagacacttaaagagctattgagtaattaaagaacagcttgtgtctagcagcaagaaagtatttgttaaaaataacttcataaacaaaaaaattcctaaatgaaaatgctatatgagtgaatcaaagtgaatttttttacattgaaaatatcagtttactactaaaataaaagtaaaaataggcattaaatttaataaatgaaacagttccaagaaatgtaagatttacttgaactttaacaaaaaagaaatatccaattcaacaatacagtaatttaggagagtgaaaagtaataattttagagtcaatttgtaataatcagtttgttaattaatatatttggaggtttttaatgttattcatttggcaacaacttttctcactatactatggctgcagtactgtaaatctcccttgatagtgaatattcaacttgaagtaactatagtgacagccaatatatggatgtttctcaaataccacatttacaaaatagttcagagaaaagaaaaatacaaccatcactcatgttgagagtaatttttaaaatataattagcaattggttgtagtataaaatgttaagtaaataagaaagtaaaatataaataacatgaaaaaatcaattatccttctcttgaacaatcaatagttctattgcatagatctggaatacaaatccattagttataatctgacttaaagggagattccttgaaacatataggattttaattatatcctccaaataaggataatggccaaaggggcttaagagcaaatatgaggaccacgagtctttgatgtaatgcaaaaaaccttcacgcactgaattgaaaatttatttgaaatccctttacgttaagtttccatgttccccaaattctttcaaagtaaaccgttgtttcacagtaacaatcattctaacctaagctgcctctctgttgtgattatacaagtagtcaagcccacacttcacatatctgcttataaactgggctcataacacaaatctttaattgggtcttgggaccaagtctgaaatcaagaaactctagctattttaaaatattaattccaaccattttgtttatattaattggcttggagtcagtagaaagcgtagaaataaatataaaaatatgaaaacaagtgagaatagtactagtaactatagtaagcttagcaacacattggcaaactcacttttcctttgttttgtcatgtaaacatttggaaaacatgaaaagaaaaactaatttagaatcagggctcgagagatggctcttacagaacactcacgttgtgtccatgttgtatacaggatgactcacaactgtctgtaactccacctctagatctggagctcctctttggaatccatgaatacctgcacacaattggcatacaattacacaaatatacatgcattcacataataattttttaatcttaaaaaataagcaatacaattaggctatggatttccttttaaatatataggacaattagctcaggttatcgaagtatgcctcatttgaaatagaatctgaaatacaatgtctaaaatttttgtctaatttgaggcttaagagagtactcatattttgttattcttacaagaatttacaaattttgttgtaatttaaatatagaagatttttcctactatctcctctttcgtgaggtcatgtggaacctacccaattagaggcattgtttcaaggggttataaaacatttaaggggtggggcctaacagaagaaagtggatcacaaaggtaaggtgtgtagtcttgggctttatagtcatgcccctgtgagtcccagctttctgcttctttgtccactgaaatgtaactaccacaaacccagacctgccatcacccaattcctaccatatgtattttctcatactctgagtcctcaagttggtcttgtttgtactccctcagcctagacacacaagggagggcctaggccctataccaaagaatatgatagactctgaaaaaccccccattaaaggccttactctccctgggaagcagaaatgatgtgggataggttgggtgttagtggggggcaggggaggaggagaggcagaggcaactgggattgacatgtaaaataatcttgtttctaatttaaataaaaatggagaggaaaaaaaagaatcttattcaaaatcattcccaaagaaaaaaacttgcctgggtcaaacaagtcgacaggaagtactaacctcaaaagtgtggaaggcattgctaaaagtttagctggaagaaaagggcatatacaactgtattagattaatgttatcttcaaataagtaatgagaaaacaatgaagttgattttctatctaatgctgtttgggaaaccatggcaatgttaggtattcccagcagaagcaaattcatctcaatcattcagctcaaatctgtccttataaagtagttgagaatttctttcattcaagcaagaattttattcatttcagaattataggggctatgtgttaaaataaaaataatatcaacacatcagtaggtggctgatatctatcatagctccctccagtgacttcactatgagaacacactcgtcactcaaactcttggggactcactcatcacatctcacattcaggattaataccttgccagcctgaggccatgaagcaagacaggattgatgccaatctcttcaaagttttgggtcaataatctgtcataatcattttctctttctttgattacccacctcacaccttgactgtatcaatcctcaggcagtctggtatggaaagaaatctgcagaatnnnnnnnnnnnnnnnnnnnnnnnnnnnnnnnnnnnnnnnnnnnnnnnnnnnnnnngactcacaaacactgaattttcttggaaaataatagttgacttgaagtcccatgtgaagatgaaattaaagtgattttcagtaacatagtggaagtcattcattctctgaaaaagaaaaattaaataactggggttcctgtaatattcaaagatcaagaaaagtattacctaaaattctgtagacattcttgatctataaaggtaataaaggtaatatctccccctctctgtgtgtatgtacagatgaactgaatcatgtcatggcatttatgaaaaggtgatatttcactatgattctgtgttctaatcatgtatgccacattccaattttttacagcacagagccatattcttggaccgcatacaactaggctttacagctagaaaacactggatgtcattagttggcttgagtgcttgagttcatatttcattgccttcacattctaccatatagagcaattttgtgtggctaaagatgaattttatggtgtttttctaaaactcctaattataaggtagtgtgcaatgactgcttaaagttatagctccagcatttgatttattttacaattctttcctcactgttctttactaaatagacattctttgtgttttattagagatttctcccattgcatcatgctctcagtgggatggctgctggtgttttattttacttctgccattaattacctgtggctcagtatcatgtctcttacagacccatttatcataatagtgcccgccggtgtccctgcagtgagcagcctgtcagactttccattggaaaccccacttctcaagggctttagcgtctgctgtaaaactgtgctttaatacatacatgttgaaagtgcatggaatgatctatggctctctttacttttagccacaaaaagacatatttgggaaaacaattacttcaaaattgatgtgcatgaacattgtggtagagaaccttgtgtgaaaacaatgtagcttaaaaatatttattgttctgtgttttttttttcatgaaaacatgcttctttgcagtagataggtaaccataaatagaaatacacatattttcatggatgttctctattttaatttcacaaaaatgtgcacgattgctacatttcttgggaactttgaataagagaaattgaagcatccagtcacaaatggcacgtcgttaacacattcctcaccttaatgcttcagggatgtatgcagaagaggaggccaaaagactttaagaaccaaatgtggcataaggactccagggaaatagtgtcttccagacaaaacaggaatgatacacatatgaaatcacatatggaaaaacgaaagatccaggatggccaaaacaaccctatacagtagagaaatgtctggaggcatcaccatccctgacttcaagctctattatagagctgtagtactgaaaacagcctggtattgacacaaaaatagacaggtagatcaatggaatctaactgaaaaccctgatattaacccacacacctatgaacaccagatttttgacaaagaagctaaaattatacattggaaaaatgaaagcatcttcaacaaatggtgctggcataactagatgctgatatgtagaagactgcagatagatccatatctatcaccatgcacaaaacttaagtctaagtggatcaaagatttcaacataaattcacccacactgaacctcttagaagagaaagtgagaggtacccttgaaagaattgatataggagaccgcttcctgaatataacaccagtagcacagacactgagattgacaattaataaatgggacctcctgaaactgagaagcttctgtaagccaaaggacaccgtcaacaagacaaaatggcagcccacagaatgggaaaagagcttcagcaaccccacatcggacagaggactgatctccaaaatatacaaagaactcaagaagctagtctccaaaacaccaaaaaatcaaattaaaaagagggatactgacctaaatagagaattctcaatagaggaatataaaatggctgaaagacacttaagaaagtgctcgacatccttagccatcagggaaaccacaactcaaaaacaattctgagataccatcttgctcctgtcagaatgactaaaataaaaaataccaatgacaatttttgctggagaggatgtagagaaaggggaacactcctccactgctgatgggagtgcaaacttgtacagcctctttggaaatcagtattgtgattactcaggaatatgggaatcattctacctcaaattccagcaattccactcttaggcatatatccaaaggatgcacattcatacaacaaggacatctgttcaactatgttcatagcagcattatttgtaatagccagaacctggaagcaacttggatgcccctcagctaaagaatggataaagaaaatgtggtatatttatacaattgattactactactcagtagaaaaaacaatggaatcttgaaatttgcaggaaaatggatggaaatagaagaaaccatcctgagtgaggtaaccagtcacaaaaatacaacatggtatgaagttactcattatggctattagatatatagcaaacgattatcagaatacaatccacactgcttcagtagctaggaaacaaggaggaccccaagagagacattcaggttcccctggagaaggggaaatggacaagatctcctgagcaaattgggagcatggggggaggggtgaagcatttaggagaaagagaaggggagaaggggagggaaaaggaggcaatgagtgagaatgatgattgagtcaggagaataggggagagaaagaaaagagatactataatagggggagccattataggtttaaagagaaatctggcactagggaaatatccagagatctacaaggataaccccaaccaagaatctaagcaatagtggagaggctacctgaaatgcccttcccctataatgagattgatatctaccttatatgccatcctagtgccttcatccagtagctgttggaagcagaagcagacacccacagctaagtactgagcggaactcctggaatccagatgcagagaggaatggtgagcaaaggggtcaagaccaggctggagaaacccacagaaacagctgaccttaacaaaggggagttcatggatcccagactgctagctacctacccagacctcaagaatatgggtgtcagttaggaggcctacgtaatctatggggcctctggtagtggatcagtaattatccctagtatttgaatagactttgggagcccattccatatagagggatactctctcagcctagacacatggggaagagcctaagtcctgctgcaaatgatgtgagaaatttgaagatccccatggaaggcctcaccttccctggggagcagaaaagggatgggatagggggttggtggggagcaggggaagatagaagggggagggaactgggattgacatgtaaaagaagattgtttctaatttaaataaataaaaaagtgaaaaaataaacagaataaagaatgttcttcaaaccaatctacttattgatgcttgattagctagtattaaaacagagaaggaaggtatgacttccataatgctcagttcagagcgatgactttctcagcatgactttgccagccatggattttgtctccaggcaaagaaaggaacagaaaacagtcaagagagatcttcgttcactgaattccagaaagagatatacctctcctccaaaaaaatccttgggctggggaacattacaggtctttcctgtttgctgaaaggtgttcacataaggttttgtgatgcttaacccataaatcttagggcacgaccaaggagaatgattgtctgtttccatgactcagaaatctgaacctatggtactgatttgggccaaataatacttttcatcacctgtgtcttggtttcattcatttgaatgtgcagaagattaaggttatcattgtggtcagtggtattagtggaaataaagaaaggatagatgctggacttgcagattatagtgaaacactaacctagagttggtgtgattgtcttcattctctcccttggtagttacagcacagcacagctcaagtttatgtgaaagcaaagtgcagcctatgaggcatttggacataaaagaatcaaggattagcttccatatgtaaattttttatattatatctgtaaacaatagccatttttctctttattgttttattttcctcctaggggcatctgctttcttatttattctcactacaaaaacaaagatagcatcacaagaataacaattccccattctgaaaaattaaatggcatgtcaagaaatttaacacagtatcaatactcaaaatattagccagaacattctgctctactaaaaataagtcatataacaaaaatattgttaaattttaacaccatacaaatgtctagcagaataaaccttgcttcagtacatttgtttttctatagatgtaaaactaaaattgtttaaattattctccttttgtaacttaatgtatacatttcttatgtgctctttattgatattgtaagaccctcagaaagctgaggcttccagaatcttagtccaggacggcggccaccccaaacacagaatggaggcgaaagcttgatgcaaactgcatgaggctttattgtagtttaacaagctaaccccatgttagctcgggtctttcacccacccgctatggcggatggctagaaaagacggcttgaagctgctgcgcatagatctttatagggcagcgtaaggggagtgtctaggggtacgcactggctcacgattggtgtgcctccaggcttggagggcttgccctgtgttgattggtcaactggttgttatggcccataggccctcccagagtggttgctatgctctctacgtcattgctgtgcgctagtccgtaaagcacacccagggtcgtaaagcatagcaccaccagctaacctctgattggctccctgtcacgaggcaggcatctgactttctagtgtctaggtcaaggtcatagaagcacatgttcggctgttatggctgccaaaagggaagctggttccttcaatataacatctatgctatttgagaatttttatccttcacatcaattctgtagactgtttctaaaaatggctgcctggcagtaactgcttatcagcagttagcaactatgtgcttgtaaccaagaacaaaaccatcagatcatttcatatggagaatcattctgtttttcttcaaatacccatctgccagcaattagttaacatgagaaaacatattatagcagattacatctgtgtgtctacttaaatttgataaggactaactacatatcttttattatttgttgaatctaatcagaggtagcaccaatggtaggattgctcatcaattgtctcaaatgcaaccagttgaattctgataagcaaaacttcattaaaccaatcagtataattactctttacatttgtaatcaaactcagtaatatttacaatacatatatttatttatgtcaatcttttattacaaatctaccaagatttaaatggtgcatgacttaagaaaacaaataccaattctttttttaggtgaaatagcacaaattttagcagaagtttcctgagggtctgaggactccctcccttcccttttcagtcctagctccatcacagtgagaaccaacttaacccacccaggaaatgctgtggccttcttgaatcaaactggagctccttttgttatgcaaacaccatagccataaatacctcatgcacatgacttgttttttaattaggtaaaccttacatcaagactcctttctctatgtgactataaagacttctatcttacctataaatttttaaccagttatatcttcttaataatccccagtaactagttaactgaatcatttatttacattcactcaacttgcaaaaataaagtttttaacagttttaaaaactatactttgagaacagattaaggtggaagaaacaatgtttctgttgtccacgcgacatttctggtgatgaagacgaaggtatgtcttggtcttatgtcttaatattttgaaattatttttgaggttatgctttatgtaagcatataaatgatgcccaggaatgagtgtgaagcaaacacagtatctgcaattcttaggataaattatctgatttcattaagcaagaaaattgtctgtaagagcagattttcgtattctctttacaaagagtcctcaaatgaaaagtgttgataggtcttgctgttaggagagtcaagctggtggaagccttctactggaaacattaaatatttaaatatcttatttattttggagtgtatagtgaaagatcccagtcatcattcgaaatacttaaaaatttaaacaatttattgttttgctccttacaatttaaatttggaaaagtcttaaccttcctcttatttaatgacaaaggccatccactggaagcaagcttattatctagaaaggaacaatacaaagaaaggagaaatcagattccatttctaacactgactgaaactcatctcttcctttgggcatgcagagaactgaaaagtagaataaactttgattttatgcatttcctgagcaatacaaagaagaaaattagaggttcattttgatggcatttttctgtgttattttaagaattctgccaaaacctccggctgtcaccttcaatgacaactaatggcattgaaagaagttgcacattccagaagccatttgactaatgattatctggtgaaactgaaaccttaaaaagagagcattccacaggaccactggctttcttaattctagaatgtagagataaagtggccattatctgtagtttatgtaaatcatgtgtgtttttatcttctggttgttttataggaaagtagtctaaaaagtaaatttaagggcttcagagaaatcgaagcatatccactgttctggcatcctttatgcctgattacccttcagtcatgtattaactccccgagtatctgcaccctttaatccagtataataaatcatgaaatgatttttctgtgagagacaaagggggaattacttgaaatgctagcacactactgaagtggaggggaaggctgatgcaattatctagatagtctatttattccttctccattcctctgtatatgaggaagggaattattattccacacagttactgtcagaactgcatcaggagagagattagaaaatactgatttataacaagaattacaggtagcttaaggaaatcatataaaatgactttaaggatttcttatattttctctatttttaactcatctctagtcctttatgtctattgttttgaatcatataacaattagtatcatattaggatttttactatttatctgtccccaagcatataactttgcattcagttgttgtatcatctttgaagcaggagaattctaatatgtgggcatataaatcattgtgttgcatgataaatgtgccatagaacattaggtctcatgtccagggagggaaatgaatagctgtgctcttagagcacacagtgagagctgggagtccttagctagttcttatcttttcaatgtgagtaaacttcacctacttcccctgaaacacatgaactcaattattaaacatttcattaatttctttccgtaaacaagccaagtagaaactattacagattggaatccatgcaacagagtggcacacaaatctgctgaaatgcacatccctttttattctcatcattgatgggtccttttatttcaggctattagcttttaggtgcagaataattttttagcagagcagtgccatattgtcaatctggccaatttcgattgaaaaaagtattttgtattgttcttcatgtaatctacagaaagagacaggcagagtggaacaggtgcagggattcatacaataaacacatgcgtattttctctgcatactaattaccagccaaattgctagcaagtaaaaacatagatgagcaaaggggtgatacacttgaggaatattccagagattacagtgtttaagcccagtaggtaggcagaaagtagtagtcaagtgtatttgctacactcaggcaaagcagtaacttgtgagcagtttggttccaggcaaatcacattaacagatgactatcttctgatcctattttataaaaccactggatttgaggcatagatctatagcccaaaggagacaaacttttcctcagaaagctgagggagacttaaaacatgctggttaaggtgtactgtagctagtcaactcatactattcataagtctgcaactaggggtttggagaaacacctccgctctctgtgcaagcatggtgtgagggtctcagttcagatcccaatacccaagtttaagaaacaaacaaaaaggctggttgtagtcacatgttgggaaaaaaaaaaaaaaaacgggaacttataggagttgctgaccaccaaattagctgcaagtggagttagagactcactctgcaaagaataaagaagacagagaaagagcaggagagtaggccttcacatgtgtgtgcacagcctcagatctacatgcagacacatagttacgcactatacacatacacactcacacacaggcttatgcacacaaaagaatcactacacatggaataattacagttaaataagaaatagtgtatatttcaattttactatatatatgcaaatcccagagtttccaactttgaccagtagcagctacataaaatctttattaaatgctttattctaaaataaaccttggtaactcaacataaaaaataacagttccctactaataaaagcatgataaaataaaagtataacagtagccaaaaataccattcatcaatgttatttttatataattgattgtaggtttcaagttagatagaaaaaagagtccagtgcctgtatctgaattttactggcagacaccaagaagcattatattgttattttctggtatatgtgaagaaggagatctcaagcatataagtgactgaatttaggataaatgaactttagacatcattgagtccaatcctcttaaattgcaccaaatgtttaaattggcaaaaacatagggcatttaaacatctaagtaattttagcagcatcagcattgaaaacaaagaaaagaaatccttccatattttaaaacaaaactgcatttggcaagtcattttggtctgatagcaaatgtgttgaacatatttcctgttgatcagtaaagatgactttgcagtacctataatctgcatgacaggaataatgaatcacctcatttgcataggaacgaagctatacttaaagggtttgcaaacaagactgaatgttgccaaaccttatagatgaggacagaggaatgaagaacaaaggggtgcttgttaaccctaaaacagctgagcaagtctctactcatggctctgacttgtatcaaaacttcctaaatcttgtggtgggagtagtggcaccaggaaaggaaattcagagaatgctgaattaaaataaggaacagaaatcatggagattaatgtaggagaaaaggagattaaaacagcttcagttcttcaaaaagtatctaagatgtagaaaacttaccaaccattaagtaccagtggtaagaggcactagaagggtgggttctagaattcctttagctgtattctattgaggcaggcattgtaatctggacatgtgagtttaattcttttgaggacactacacgtgaaatgcatgtttatgatatgtagttgacctttctattccagtattcacagatctcccaagtagccatttctgaagaacagaaatgttctggtgccaggccacatgggtccagtgctggttcttcagctctctgactacacatccttgactgcagaaaaggctgatggtaaggtggcaagttaacatctcagcattcagcaacctgcatgagtaagattacagccttcagctgttaataatgtttctaatctttccagcagagggagtgataatcctatgaaaaccggattcttcagggcccaactgttcactgttgacaagccacacaatagtggtagaattttgataataactggctcaaattttatattctttagaaccacttgacagactacaaaaaccaaggtgttcaagcagctcccccaatctcttcaagtaaagtgaggttaaactcatgttcctgttccttataggttttgaaaatatgcctttcatggtaccaggatacaccacaaagttagttttcacttattgcattgaggaacgatgacatactaggactcattgttgatctatctctttttttcatcagtgaagtcccaagtatggtcagattggcctcagcgagtagaaatgaaagcatgacttctacccttgatctcatggccactgtgttaatgtgctcacagccaccaagcaaatcattctatctccaattctggggccattctttggtgtgaattcacctaggactccaatatctcctgattcatttaatacctgaaaatattagctgcagcctataaatttctataaatcaatagtcttttataaaaaaatctctcatttcaaaattaatgtaaaactatacctatatctgactatgcctactgagagatttctttttgcaagtttcccccaggacatgacagagtgaggctgcagtactgtagccataaccacccatattgaagaagtccctacattttcattcctcaggcagttgagtacactggctatcccatgagtccccaggttgaggttgagaaagagaagacatgtctgatgcagaagtgacaaatgtttgatcaatgttcttatctaactgatttgtgccttcaggacatgtgccacttgatatttagtactggtgcttgggtctcagtatggtatgatgctaccgtaaactgttcttcaaaatgttcaggtcacatgacctcatggcaggacatagtaaggtggtttctactaagatctagtagcaagccaaaagctgttctctaaagaggattaaaaccttttacaaaggaaggtgtaaagccaggcatcatgatagaaccatttaacctcaaaatttaggaaccataagcagggttatatctgagttccaggtcagcctggtgtacattgcaagttctaggccagccagagatacactgtgggacttatctcagaaacaaacaaaaagaaaatcttagagacagactttgttctaatatctaaagtactgtgttattacctttgggttctgtgaaggtttcaaatagttaaataatttccctctatgtctttaacatttctaccaccaccagatttcttccatcccatggtcacagtgacaaatggcatcataactggatattttgtgaagtgtcctattgttctcaggcatcaattaagctcttagccataagcaatgggtcagaaaagcatactatgagatacacactgctttcaaagttcaaagctgtcagagatattgtttctttttctttgtggttgaatagatcctattcaagtaacttgaccttcacctcaaaaggcatatcccagaatagcccataccactggatagccataaatttgactaagtgagaaagccacattattcttgtggatttatttctcatcatctgtcatgttcctcaccaaagcatctagtggatatgtcctatatagtgaagccaaacaagtttatacaatcaatgtaatagaaaagagagttgttctgtagaataaaagcatggtcaaaggctctaagattagggctgggtgagtagttcaatgatggatcactttcctagcatacatgaagagccctgagttcagtccctgtgctgattagttttatgtcaacacaagctagagttatctgaaaacaggtaactttaattgaaaaatacttccgtaagaaccagcaccacctccataagagccagcaccaccttgggttagggatcctcagttctataagaaaacaggttgagcaagccaataccagataccctccactgcctctgcatcagttcctgcctacagtttcaagccctgctgagttcctgtcttgacttcctttggtaatggactatgatatagacatgttaaccaaataatataataaccaaataaccaaataaccaaatatgcacacactcatacacatatacacacacacacacactgaactcctccctgccttgcttttggtcatagtgtttcaccacagcaataggaaccctaagtgagacagtccccaaatgcacataaagtgggtatagctgtgcatagctgtaacctagcactgcatagctgtaacctagcactaaaaatagaggcaggaggatcagaagttcaaggtcatctttgtctacatgataagtttcataccaacctagggtacgtgtaagagtgtctcagaaaaaaaatatttatagagaccaaaaagaaaatggtgctgaagaaatgactcagcccataaagtaatatcccaagaacaaaacccaacatccacataaaaactggaggcatgtctataatcccagaataggggtaggagaaacaagaggatccctgaggctatatggtcagtcagtatagcacaattagtgagctctgggtttagattaaaaaccttgtctgaaaaaataagatggagaaaattagaggaagacaccagacatcaatccttggactcttcatgtgtatataagcatgtccatgcaaatatgcacacactcatacatatatatatatacacacacactgaactctgtggttactacttgagagtaggagttgatagattcataaagtagatacaaagcatattatttgctttttcagctaaaattacactgcttcttgtggcttttatgcaggtcagtagccatatcccagggagcacaaacatatttgatgagatgccatctcaaacttcagtctccatctctttcaatttatagtaattcactgttattctcctagaccactatttctcggcatatgccaaattagccaatcctgcatagatgcggtgggaagcaaatacctacatctaagaaacactgttagattttacgagtgcattgcctgcatgtatgtttgtacattacatgcatatagtgctgacagaggtcagaagatgtgtgatgccctggagctggtgttgtggatggttatgaggcacatgccaatgatggaaacccaacctgggatttgcaggagcatcaagtgctcttagccactaagtcatctcccccgccctccatctttgaagtttcaccaatcagcaaccctcacagcaatatagaacactcctgctgcaaccctctcagcaatatagaccattcccacttcatggtcagtcagtgagtaaaaaaccctctgggtccactgtgtgggaacctaagccaacatctagagatcacatgatgtgcaccaggccatctctaaacaaaaaccacagtgacattttgaatatctaaaaagtagtgtgatctcagacccagttgcctaaaatcccacaagtgtgggaaaagtttgacttccgggtactggtctcattcaggagagctgggcatgccatcttccctcaagaagccgcagcctccccttcagtcaggggtataaggtagttcaagtgtgggaaacaatgacttcatttccatgtctcaagttccctgggtagaaattcctactcagatgcaacaagaaccaccatgtcagtcattagcagtgagctgattctccccattcacagtagcctttctccttgtgtggcttctcataaagccacatgagcacccacttagcaaatactgaacctgctctcccaggggcatctcaggctggttccctgagctgtgcccatggtactcttgtcaactgctcaactcacaaacttctgggatctacacatttctctttaaaaattccttctttaataaacatcatttatactttcatgataaatttactgcccaaggcattgttcctgcttgctgaacagtgcttttctggcatatgtatcttctctgtaaggcacaccacaaccacattgtgtccattcccagcacaggacattaataccataattcggggctgctttgaacactgaatccagtcatgagcacaaaaggcagaaaatgtgtcactatgtaaagtgtgaaacataagtatgcttgtaatataacagctgggataaaaaggactattacctcgtaagacagcagctgtaaatattttcttttagtttgtttcttgctattctgtacaattgcatatccataaaaggtgtcaaaggtaccgaacaatttcatttgggggttaaaagtaagttttatgatatgtaaattcttaaatatggagcgtattactaacaagagttgattgtattctagttcatgaaacagtgagtctaattatccaggacaaaaagttctatggtcacaatattgtgacaatagttttggctctgctgttctttacaataagtgtagtaagccatcatagcatctccaaggacatattttccagggctgcgtgatgcctatcattggtagtctcaacacttggggctgtaaatgatacctatatttacagctgcagtcttataaggtaatattctttcttattccagctttattactgatgtgatgctattctgagctccatgctgagactgttaaattcatattttcagtcaacggttttctttgtttctttttgtttggtttggtattggttggttgtaccttttggttttcatagtgctgtgggtagaacacacagccttgagcattgtaagcaaacatccaaccattgggcagcaccccatcctcagcacaagttttgatgctagcaaatacttggttacccagagctgtgtatctatgggtaaatgactatgagtgtctacagatggtcatttatattaatgcttccactttatctgacatggcctcttcttctaatccaatactgaaaacagtattatttatggcatttacatttagtcaaaccaaagacataatttcagaataaaaagcagaaataaaaagcaattatttagattctgttcttgagccatttctgttaccaaattgataccaaggttgtattagagaagcaggtgccatgcacagcatgaagcaaggccccagcagcactggtaactaccagatggccctgctccacccccaatatctaaatcaccagaaagaaactctcttgacctcacccaacttgaaacatacttggcagttttaagaacattgtttatccctgtcaaatttggtatattacatagccatcacagtatcattaaaactctgctctgaatggagcaatattcagaccagagtaagattgctgggaatactgaaaatacatgagaatgaggcaagctggttaaatttaaaggactaggcaggttttaaaatagggctcctgaaacggtgagagcccaaagaagatacttctgtctctaactcaaatagtctccactccaactccatctaatctgagaaaggagttatgtctattatcaaatgtgagtgtcaattaaaatggtctgattaaatacgaatattttctcatctgcatctgccagttctccctcagaaagccacatttttctccttagaatatcagtatgtctagacatcaaatacatttattattcacctgagttttgggttatttcgggtaaagggatgacactgtatgtttttcaacctccagaagttctgtaacacaattaggacacaacatgctctcatcttatggagagggccactgcatttgtggcctccaagacaggccattagcatgatgcaatgttttccacactatcaggtaatcttatgctcatagcagtgattttactagggaaagattcctacagacaggaaaaaatcaagttaaagtacttagtccatagagcccttagatctgggtcataagagatctgacaatagataaagaaacaaaggccttgccaaatagcatttctgagcatagtgtcttgacccattttccatttttgctaatgtagtggcaagagaggccgtgggatcagcatggatacttaagacattaggacgtaaatggtattatctgcaaagttacagaaccaaaaacaatttagacatactacttagaaagtcttctatctatgggaaccaaaagagtacaacacaaatctggtttaatatctgtaaggagtgaacattactgaaggaaagataaaacaaatttgacattccaagagagaactgtaacaaatgagaacttactggacatgtttttgtcagagcactttatcaaacttaaccattgatagtgggcatgatattctgtcctatacagttagtcagcattgtagcacgaattctagttggtaacaagaaaaacccagagacagatattggagttaaagctgaagatctgagaagcaaagcggctatccactatagagttctcacctctaccaatactcagacagaaggctgatcttgtactcagactgcatcaccaaaggtactacacctcagactgcaatgttctccaccaaagctcagactgccttctgctcttgtctcctcctaccttatatttctctctaatgctgggattaagggtgtgtcatccccttagctctgttactcttttagactgattaaccctcatgtagcccagggtggccttgaactcacagaaacccatctgcctctgtctcccaagtgctgggatttaaagtatctcccccactgcctgtcctctatggctaacaaatggcttaggtgtgtggctaactagtggcttagctctgcactctgatcttcaggcaaagctttattagatcataaacaaaatatcaccaaacggcttcatgcttagacaccaaaaaacaatgccagtttgcagggctgcttttggagctacttaaagaatgagttataagcctcatgactactttccattatgtatttcacctgcagttgagcaggaaaaatttaaaaaaaataaaaataaaaggtaccaccaagagaggaatggctggatcttgaggtagactgattaccatttttccgagttataattatgttcatagcaggattgtttgtcatagccagaacctggaagcaacctagatgcccctcaactgaagaatggattgaaaaaatgtggtacatgtatacaatggagtactactcagcagaaaaaagcaatggaatcttgaaattcacaggcaaattgatggaactagaagaaaccatcctgagtgaggtaacccagtcacaaaaagacaaacatggtatatactcactcatatatgaattttagacatagagtaaaggattaccagcctataattctcttcaccaaagaaactagggaacatgaaggactctaagggataaatggtccccaggaatgggaagtggaatgaactcctgagctaattgggagcatgagggtaggggaaagggagctgccacaataagagcaagagaagaggagtagaggagaggaaatggaggaatagaaatattgagttaggggaataagagaggagagagagcaggatgagagataccatatcagagggagccactataggtccgagaagagatctggaaccagggagatctccagagacctacaaggatgacacgatctgacaatccaggcaatggtggagaggataacctaaaagcccttcccctaaaatgagattgatgatttctctttatgccatcctagagccctcatccagtggcggatggaagcagagacagacatccacagatatccattgagctgaaatcgggaatttagttgaagagagggaggaatgaagagcaaaggggtctgtaccaggttggagaaacccacaggaacaattggnnnnnnnnnnnnnnnnnnnnnnnnnnnnnnnnnnnnnnnnnnnnnnnnnnnnnnnnnnnnnnnnnnnnnnnnnnnnnnnnnnnnnnnnnnnnnnnnnnnnnnnnnnnnnnnnnnnnnnnnnnnnnnnnnnnnnnnnnnnnnnnnnnnnnnnnnnnnnnnnnnnnnnnnnnnnnnnnnnnnnnnnnnnnnnnnnnnnnnnnnnnnnnnnnnnnnnnnnnnnnnnnnnnnnnnnnnnnnnnattgagggccctaccctgcctggggagtggtgggtggatggggtggaggaggtaggttgggggttggggaagaaggatgggagtgaggggagggagaggaagaagggacttacatgtgaaacaagcttgttccctaacttgaactaataaataaaacaaacaaacaaacaaaaaaccaaagctaccaccaaatttagagccagtcattccaactatccagatacatcaccttgatccatgactacaaaatagtttttatggctttcatactcatgaaagtgatttgagaagcaaagatactggtttggggctgcttgtcaatacccttcttcaaactcatcaacaagatttaaaagagtcgttcccatccaagctggccttccctttcatcacattagagcacctagttaaacagcaaggacttgtaagggaacattcagcaatctgttccacacacatttcttttgcagccaaattacacctgtaaagacaaagcagaaactctttggtttccaaacagacaagcgctgaatgttttatggtttatgcaatagctactgtgtgttgctgttttttaattagcatatatatggatccctttcttccatcacatgtaattgtggtggtggtaactcaaggaaagtatcctgagcatttacattgtggggcattgtgatgatttatgtcttgggaatgggacatactgtgctttacatctgctcccaagttatccctgtacttcataatcccattgcttttaagaactagaaacactgtgagttttggagcttggcttttgttgttgttattagtgtttttaccacactaggaatttctttcttttaagtgctctgttccccactatgaaactcaaatcaattctactgaatggtagcaattttctcctaaaatctgtccttacaataatgaattgtccacttaatccactcctgcaaatccattgggtgtttattgctgaaaacaacaaacaatatttcctctcatttggtcagtaactaggcttgcactctgcctcttaaaatgtctcatgaatagttaagggtgacagtctttattagagaaactaaacacacatttgatgagtaacctgtataatttctccatgctacaatattttggcaaaccacaaggttcaactgaacgaagtcatcatgcagataatgtccttaccttctgaagatgctctctgtcttacttagggtttctattgcatccaagattgagcaaagtaatataaaaaaagtaataccaagaattactcaaggcagccaggagttggtggcacacgccattaatcctagcacttgggcggcagaggcaggcagatctctgtgagttcaaggtcagcctggtctacagatcgagttccaggacaacctccaaagcaatacagagaaaccctgtctggggggtgcggggaaataattactcacaggctggagagatggctcagccattaaagcctaggctcataaccaaaaaaataagaattactcacattcacaaaaataaatgtttaaatttatcaagactgttaaaaaagagttttgtatgtgtgtgttcagtcaattaccccatctcattttcttatctcatttaaactaatgggggaaatgattactgtcttttcacagatttgtaaattggggaattgtgggcaccctgtgagctgatctttgaaaggggtgctgatgtaatgtgtgcattaatgctacaacttctgaggcagaagagaggggaggcttcagtgtttacgtctctgacctcttcagaaagtgttcaaaagtgttcctctccagtgttactgctgttgttactcacaagtatatccttgactctatctctccagtctgcaatgaaaaccaaggagcagaggtagcaaacaaaaagttactaggtaatctggtgaacagttcagggccaactatgctcccatcctgtctttcatgtattaatgcatccaaatgcattgaacaggataacttctctttcttttcttctgctctggttgtgcctacaagcaatgacagagtccaaggtacagccagatccacatgtccacttcctttcccagagaaagccatcatcccatgtgcttgtgaaagtccatacccttgggacttgcttcttagtcacaaaatgattaagaatgtagaaagaagtacacagtccaggtcatttgctactaaactacaaaggttaattagttattttatactaattagatattagtcatactaattaggtaattattatttccaccttcagtagttgttagtgttcatggcaaaaatcttttaatatgaaatgaaaatctcagttttaccaaaatggtatgctgataatttagtatttaatacaatggtttttgtttgtatgtttattgggacaggatgatacatttcccagactggcctcaaatttactatgtaaattgaggttgatcttaaacttctggtccttttgcctccaccacccaactgctaaggcatatgccacaccctatgttaagtacttttttcagtaacatttaaggataatcaagttgagtcacataaataaccatcttcaaaagaccttgggatttacacaaattttcagtaatgtctaaggaaaaaatgtacatgtaaagaataatccccaagtgaactaattctgccaatcttaaatgccaattatatgtgtgtggtcagcatataacaaataaaatgctcacaaagagttaagttcccccagagcaggtatttactggtcagtgaccacaatggctataaatagaagcatggtaaatgtttatgctcttttatgaaggaggtggccttgtggacctgaaatataaataaatctacattccattccctcatttttctttacattacctgatttgaagacacagtgtcctaaaggtcactgggtgattcatatgtaaacagggaatggttaagcctgaacatctacttcctaagagattcaactagttacgatccaggctctgtaatcattaagaaagtactggagtcttgaattcattaaagtcttttaaaattcggccagtgtagccctagctgtgcaggctacattgcttttcccctgatgtgccaggtctcctgggagctgacatagagtggctgctccacacttagaaagggaagtaccacctgccaaatccaaaaattgctgctgggattagaagaaattcccaaactgcaccacagcagaaacaaacaactagtctgctctgttaaaatagcaagatgagctaaaagagctcaaaacttttttactccatggaatctgccacagcaactgctgggtaacatggatgtgatttaaaattaacgaaatttagctgaaaattgcagctgggtggaaagtttaaaggatgaaaagtaggacaacgcagatgagctgcttggcaattttctgaagttttggaagcgcctttaattggtaagtcactcttactgtacctcgaagtacacacggcctcgtggctgagctgcatctgcagtgtttctgttcaacagtggctgccactcacatgaagattgccacttctcagtatgccttgctcatctttgtgtccctaaagatccccaagatgctctacctatgagacatacttaattgaatactaaaagctgataaaaataatttctgtcatcatcttaaatataccagggctttgagtttaggtgacatagcaaatcagacagtggccagatggatattttgaaaattacaaactcatatattattgccatcctgtggggaataatcagtcactggatgtcactacagatgacaggacttttccctggcctctatcttccaatccacaatgctgtcccttcccacacaaatgagaatcctgatttatccactggactccagggaagaaagaaacatagtgcttttcagtaaccatttcattgccatcattagcctgtattaaaaccgcatggaccaatttattaaccacttgtaaacatgttaatggaaacatttatggtgcttttacaaggcagcacacttgagaatttcctcccaaatactcagaagtctgttgattctattaagatccagccaaaggctgggagggtagtagttgagttggtggtgtttgccaacaaagcatgaggcttaagtttgaaccttagaaacacacacacacacacacacacacacacacacacacacacaccctgtcatgatggtgcacagttgtaatctcagaactgtggaggtggagataggcagatctttaatcagcctttctagcttacttgacaagtcccaagtcagccagaaaaagaagtgaacacctgagaaacgaactcttattttggcctctagcctccacatgcatatgaagtcccaccccaaaccccactccacccccacacaaatttactcaaaaatttgcaaggcaaacagaaaagcacatagctccctctatgaatactttgaggactgcgatcacaatacttaaaagtcaagcccagtgtagaaaaattaaagtccagttaaggtccattaattataatgcaattcctcagccaaacaagagtttggccttaaatcaatagtcaattacatacttcctgcagttctagtcattaattgctctgcagcttagaaaataacattctaactgcttgtagaaaggtaatcaaaatcggtgtctaatgcttaagcttgattctgttgtgatcatctttcctcaacaaggaaaattaacttcttcggtgacttggggccaaacacttccaatgcactcataactgttaaaaactgaggacaatggcaagtaacagattctgggtggtagaataatatttaatgtatcttaagggacaagcaagacaaaaatagcatccttggtcttcacaaaagaaatgcctctgagaaatgccatcacttctctatcgggtgtttagctggagacacacagaaaatttgctgtccaggagatattggatgggaaatgtttacaggataacatctcctagctgctgctggcaagggagcatttaatggtaaaaaggacatgctatctggctccgcaatgaggaatcactttcgagctcagttctcagcacagtgagactccttccgtcaaaggtgatttacaatgatcccccttgtgagcttcacccagcatatacatcgcccagtgggagacttaggattaaggatatccacattaaacatagagcctcagaacctagacaactctcagaaatcaccactgtagtgaaggatggggagagaggagaatataattgagagacacaatagaaatataaatgccgtgcagttgggggaatactttaatgcattactaatactttaaatgcatttgaactagggactaggaatttacaaagcccatatgtagtatgaagctctacctcagccttccacagtcaggggaaggatgctctgagagtgagcagaggagccacagggcagagaccctggaagaagaccccattgctttcattgcacattcatggcttactgtgcattgcttagaagcatgaaatgcaaggtgctcgaaatgattttatttgtaccgatttgaaatgatcttttatgtgtgtgactggcagggatgtgttcttctaagtttccccactatagatccgctatctcctctgagcctcctttatttttatttattaatttatatttatttgtgctaagctttgcatcccaggactcatgcaggctaaacccaagttctccactgaagtcggcctccagttccatcggacatactttttaggagcatggacaggctttctctatgtaattcagtctcatgggattggaaagcttcctggaggggtggatatctcatgaatcaagatacagagctcaaatatttttccaacagtagcagtgaggcatagccaatattattctgtgcctgttctcatccttgtccttgtggtccctgacagagtgtttgaaacaaagcatcagctagcatagcagagggagtggagggagccctgagggaatgtgcaaagttgacgtggaaacagtgatgaagaggaccaaggcctcagaccattgaaaacaaaaactaaaacaaaaacaaaaacaaacaaacaaacaaacaaacaaaaaactggcaactataggcacctcgtggaagaccagctaagtatgcctgctgtgctgcaccaaagaaacaccctgagtttccagtttgcagccatggaagtatggcttactgtcagagcacacaccccccacatggccccagtttttctcctgtgtctctgtgtggctgtcatttcttcagtgcccagctcctagtgaggtttccctagccaagacttgtgagtcacggcagagtgggagagaggcagggtgtttcttatgaggactgagtcttcgggttccagggaaactgatatttcccagaagtttctagtgacttttaagtagctggtcagaacttaacagaaagattttctggctagatcttttcctcatattcagcagcttataaaaccaaggataagagcttcatgattctaattactggtcacaagaatgggtcctgagtcatatctctggccctgggaggagacatgatagacaatccgaactgcccagaggccattagttgataactatctaaatcaggtttcaggagctttaaaccttttacaactgctgtagagcacgaagcttcctgataaacaacgaggacatgccattgcccctcctgtaagactcgacccaaatgagtctgtcaatcacttagacatggaagtgcccctcaggaaagctgtctgctctggagacattacacatagtataagacctgcttataaatgaaggctggcacaaagatcttttctggtcatgtgagtgttttcctcccagaagtcccttcagtcaagtcaatctctcaacccctgagaggggtccatttggttctgtaacaaactctgtccatcttctacattaacctctgtgtctcatatgaattctttggctggacatcacaattttaggggaatcaagacaagtccagagtgagaccatggtaacaaagactatgtcagtccattttgtctggcaaaggtagttcttccttgcctctgcactatgctagcagcctcgatgatgccaagagcccattgcagggccatgatttatgctggagttctggcatgagaggagatattctaaagagaggtacttgttcccatcttgtcactatcagagtatcaccaatctttttcacttacaatattagtgtgtttagaggaatgctggagttaaggagcagggggtttattcgtaaagaaaggttacaacagatctctcttcatccccagaaagaattgccttatatacctgccaggcctgggatgcatgggatcctacatttcacaaaacattcttttctccttcaactttaagagccccttttcggggagcacattagccccagactgctgtctgggaggccaacatgggactgatccagaccattgatcatggatgtcaaggaggaggctttcgtactctatggggcccctggtagtggattagtatttttcctggtgtaagaagggactttgagagcccatcccatgtgaagggatgaactctgggcctggacacaggatgacatggtggactttggggagcccccattaagggccctatcctccatggggagtggagaggggatggggtgagggtcaggttgagggctgggggagagggctggggggaggggagggagagggagaaggcattgacatatgaagcaagcttgttcctaatttgaactaataatttttttttaaagagccctttttcttggactctcacttcaacaaaacctatatcgggaacagagaatagagacaacctgttgctcaggttctccctacctaccccagtacctcagagagaacaagttagtctgtctcatggttaaactgacatgtgcatgcttcctggcttttgtttcatcttttctataaaactgtcagatcactgtaggaaaggcagggagaaatccggagtccttctctctgatatgagcaaggtaaacataaatctattttctttactgatttctgtaaaagtacaccttggaattctaaggctagagatgtacctcaattggcagagtgcttgtctagcatgcctatagcccttagtttgatccccaggattgcataaactgagcatgatggtacatgcctggaaccccaggactagggagatagaagccggcaaagcagaggttcaaagtcacctttatctacatggagagtttgaagccagcagacactagagaccatgctctcaacgaataaaatggaacataaaatcataaaataatattacatagaaactaaactgtagtaccactatgctcttgatgtttgacccttatcttagttgcctgtggtttgccaacattcttttaggacgtcccatggtttattaagtcaggatataacttctctattgtcctttgcactaactgggtccttcagaactctgggatgcagttgcaaggggattttgttgttgttgttgcctgaaaatacaaatactttatactcctgtggacattccattcaggagccattatggaattttgcctcccagagaacagcaactacactgtttcttcctcaaatcagcagctaacatggaagggctcctcacaagcctggaagcatgcatgtccctcatctcaacactgcctgcatccgtgctccatcccatcctcattacagggacattgcctggcctcacccatccttcctacgctacagtacaggtttatgctcagtcttctaatcttttttattccagatgattataactttgaaaactataatttaaaaagctgttctcaagtatgtgttttgttcaatcaaaagcacagacctgggcttggggagatgactcacttggtaaaaggtttgccattcaggcacaaagactcatgttcagattcctcagcacttaggagttagactccctggtaggcaggtggatggggagagtagccatgactaggaatggaactttcaagatggctagcttccatcttctctctgattggagcctggcagcttaaaacaaaggccttgcaggcttttgtctcccatcagcagactgcctgttaacagactggcttaacaagttcaaggccagctcaagacgtgttacacaacagttgtgagccaatcaactatcctgtgtttcttcaaactgactaatgataaattaggagaggcaaactcttcagggtcttaaaaaacccaccccctgagaagagaccagagttcttggcttcctgaggccccagccccccaccctgattcccaaccccatccccatccctgcattttgcagaggatctttttctttgtctactgcatgcctgtgtttcttcacccttaataaataaatgtctgtctcaactggtgatcctgtttgctgttgtctgttgtgtttgagttttctctgctgttatctgttgagtataagaattttcctgcctttttaattgtcagagacaataaatcccatcaaggaccctaaactgtgtcatcttgtgcctgtaatcccagagctgggaagaccaaaactgaaggatccctgggacaactgattaactattctatctgaatcagaatcccaaggttcggtgagaaaggtaaccaatgttaatgtctggcctccatacatgaacacacacacatgtgtacacagaggcggagggagagggagagaggagatccaggttttaatagcatgatgtctacgatggcctttcagaatccattttaggacaatatatattatttattgttttgtgctctagtcttgtttggaaggagtctggtactgcaatggacctgagcatatgcatgcattatccattggtacttaccaaaggggatactaaggttcaggaagattaatgtctacaaggctgcacagttaatcacaggaacagggagtggaggcagaaagcatccatgcagagtccacactcagcttatcgggttatgatgcctacagactcctatactgatgggacataataacatacacaaggaaatgagcaacacctccttccaatgagttatatgaatacgtatattatcactttgtagtgcctgatttaatgtgtagtagcctgcatagctctaatcccactgggattttcaaaaaccctcctcaggatatcttaatgctaaagaactctccaactttctctcagtgtgtcacctgtttcacctgggggaatgtttgaagaggcagatcttctctcctatactgctattttgttttcacacatcatctctgtgtgtaattatgtggacaacttctaaaaatgcctaatggataatactgcaaactcatgtaactcagtggagaaataagctctaaaagttcaaatataatcagagagcacaatgcctgctaatggattcactgtaatgggtcacacaaattaagaagtttgacttgaaacccattaagttagactagggcagagagtctagtctaaaagtataattataattttttctctagacataccaatattgaattttcagcagaaaggagattaatcgtacgattctgattctaagtcacattgttactgatattcaactaactgtattctagaacccaggcatggtgcaccacaccattagtcccagcactaaggacactgaaacaggaggattgccactagctacagtctggactctgtagagagtgccaagacagaccctgtcttaaacaaacaaatacaacaaaaattaattccaggaagatagtatattttaatatacccatgtaacaatatttatttaatataccaattaatgcaaaatttctctctcgatgtgatgatttgatttgagatatattttattttgtagttgttaaatattttatgcctgtactaaatcagtgatcatttgttctgcatatatcatattcaaattaagtgatactcaaattaaatttgagtttgggtatgtttaatttgggtctgtaatgtttttatttgcttgcaagtctttttaataataaaattcacacaattaggagagattttgagccaatatgcaaagaaagatgggggggggcttatttttgtctacagcactgcttttccagcatgcatcattcactgcccagtcaggaaagcaaaaaaagttcaactactgctttgtataggaaatttaatacaaagatttaattacaaaagggtcccgaagggctggagcagccaggaggaaaatgttgagttccattgcactagtctccaccatgccagtgctgaggtacagaaaagccctctctgccagcacactgcgctgcccagacagagttcctgaggccacaatgcttctatgacttggaatcattgacaaacgtgtttcacagacatccagggtccattttcctgctgaacagagcagaaaccctgaggtgcaggttatctgcagatgtcaaaaacagcaatggcatctggggcagagttcaggcaggtctggtgaagcacctgtagtgcttagatgtgcccaatacaaccatggttgtcctgcaaacacactgcctaaacaggcagtaagtgctcagacaatggctgctgaagttagtgctacatgcacacctatgtacatgtacacatacccatacatacctgcatgtgcacacacacacacacacacacacacacacacacacacacacacacacacacacacacacacacaccagggtgactggctctttctttcttcttaagccttcaatcacttgccagttgctccctattgcaaatgtctaatatagtgagtggttctcaactttcctgatgttgctaccctttaacacagttccttgtgctacagtgacccaccacaagattgttttaatgctacttaataagtccaattatcctatgttatgaactgtaatgtaaatatctgatatgcaggatatttgatacgagacccctgtgaaagggttattggacacccctgaaggggtctcgattcacaagttgagaaacactggtataaaggaagacatttggcatggaaatttctggagtatatccccacaaggtgtaggcagcatgcaggaatctatctacctcccaagtcctaactacttttaccttcttgacaacagcctttggaaatctccagactctattctctatcctctttctcttctgttagttttgaaatcagaacatatgtatcccttcttctagtagttatctgtacaattataacccattcttgcataactatttcccacacattccaaaatttaatacctctaccctctttaaagaggacaaaacatactctgtcttcaatcttctgtttccatcttccccactattagtgtcctaaattttagtgtcatagtttaatatctttttaaaaattcaccatttcaatctgttttatgtacaatttggtggcattaattacattcacagtagtgtactgtcatcaatgatatcaatttctgacatatttttatatccctaagaagaaacctttagagctaccaagcaatagctttccattttttcctacttcttacttctcttaaacgctaatctagtttttttaaataaattttactattgtgtatatgtcctacaagtgacattatgcaatatttgtctggtttattttacttagcgtgctgcagacctgtgcaagtcctgtgattactttagtctccatgagttcatatgagctttgctcagttaatttagagggccttgtcctccgggtgttctccatcccctctgactcacacattccttctgcttcctcttccatgagcatccctgaactctgaggggagggaattggtggagacatcccacttagtgctgacagttccaatgtctccctctctgtataatgtctggcagtgggtctctgcttctgtttccatctgctacaaaaggaagcctttcttatgatgtctgagcaaggcactgatctgtgagtgtagcagaacataattagggatcattttattgttacttttttttctttttcagaagagtagaatttggttttaccctaggtctctgggctatctagtgtctggttcttggtcacccaagcagagtcatgtaactctagcacgagcaagtgatctcactaggaattttgaaaagctgtttcacttacatatgcaaatagaggaggtccccccttacgttcagagatgataaattcatatattttcatcaaagattattctaattttctctattaatctgctgtctctattgatctcaatttgatgtctatgttaatctcacatacctaatagtttagttttatttggttttactggataaataagaatgtttctgtgtagccagctgctcttaacatttattttaaatatgtaatctttaaagctccatttttatatctgtgcctcctaattttatatattgcctatttcttcattgttattttccaaaacattgtaatttagatgctatatgttatgtgcctttctcaaatagaatatcaatttttagtttgcctctgttggtctattattattattagtttatcatgactggtatttgcaataacaatttattaaactatttcaaattggctggcttgatttctctatcgttttccaactaaagatgattgaataagacatataataacattttctattatgatattttcccagttggttggacagtgctctatcattacctttcaattcacttcaattcagtctcagccaaactaaagcactgccaagtgatattatacaaatgaaacggcagataaaaataaactcaggtacattttattcacttaaatatatgtgactattagtgctatcctctactatcatctatttctaaataaaacccacattgttgattaaaatgttttaattgtctattcattccactatatatatgtatatgagcagaatacatttttatttcctaagtatataacttcattaaatttactccaaaaactctacccaaatccacctaccaccagagaacattttttctttcttatgagtagcacaatctggtagacaatatattttcttatattttaatgcttatgattttttgcaggtctttgcattctcccatcaaaatgcaatacccatgaagatatttttgactgagtattctatgtaagattgtccttggctctgatgaataattcaacatgtattgactattggctacttctaaggccatggaattaggtggtaaagaaaagagtttatcataacttccaaaatgtagagattttaaaatgtatgctataaacttagcctttaaaatcctattataataagatgtcaaattaattaaagatttgcaatatagcttacaccaggaaaataaccattgtatctgtctgatgagatcaaagttaacaacaggactaggattatttcacaataatcaccacactgatcccctagactatattccaaatacatgtctgagaaataagttgtatgtccaagtgggatgataaaattggccctttttcatccagggggtaagtcctggcaccaaacaggagcaggaacttagtcacatctaaagcatttttaagtgcatggaggagaggagaggagaggagaggagaggagaggagaggagagggacagaattagaggaattagagagagggatagctcacatggcaatccctgaaagactgtgtgccatgtataaagttatgcacgtagaacccttaggtaggacaacattatgaaatgcagaatctattacccatgtaagtctcccaagtccttgaaatgtcgctaacacagtttaagcctagaaagaaatattaacaatgaattttcaagtaaataccccataccctttctacataactcagatttatccttggaagtctaaaatagcttgcagagactgcaaaaaccaatgcaattaaaataggctgaactagaacataatttctaaagcttgtggtaaaatttttgtctactattggttacatcttcgaatgtattaagaataaataaaagtaccaacactgaactaaacaattttaagacatgtgatagttacagtatgcatgctgtgacatctggtctaatgtttcttgtagagtatgctggtttttatttaagcagcaacctacagaaaaataaaaataagcaagtcccagagagtcactaatagtaacattaaacacaacttcattctagatgaggaaagagtggcatcagaaactaacatgttaaaaaaaaaatcaagctgacaattcctcagcacatatctaccaccaatgtgtcccttcatctcctaagatatccagaaagacaatgtcatggaacagaagataaaacaaaaacatgaaattggtttaactggaagttataaaattggagcatcctcagaggcaagtgaggtaaactcctaagcaaaacagtatgctccctctcttcacccttcctgagtagctgtgtgacaattcactgccagtccacaaagccctgggcctctcaagtcggccaaatcttccctgatcattgttcacatcttctttatattgagctcccatttctcaacctgaagcttccagcctgctcccaatttttctccttagtccccttgaaagtgcttcaaataaatttaacttatctcttgtgagaaagtgcttcaaatgtgtctcatgttatgaatatcctctctccttatcccttccacatctcttagaatcatcttctccaagttaaatatccatcattctgtcaaagcttcttcgtctgagttgaccacatgcatatctaggatgcaacaattgagtttctgagcttcaccctcaatccaatcagaatccaaagctgtagatttagatattttattttaaatgtactgaattttttcagacaatatattttcatcatatacatattgatgggtcaaaatttcattactctacttcataccaacagtcacaattggtaggagaattagcaagctatcagctacatggaccaaaacccctgatggagtctgatctcttcagtctcttccacaagcattcctagtctaaatccaaaaccccggagtatacttgcatgtaaagaattctagatcatctccacatccctacaacttcatatgttctctctcccttgctctctttccccctctctctttcctctctccttcaaaaaacaattaaaaaaaaaactaaaaaaatgcctctcccaaccccaccccatgccataaaaccatgaagtttattctgtgttagccacctactcgtggttatgaggccttctctagggcatgattgatatgcccagtgacatcccattggagaaaactagtattcccttttccagcaggtgagagagtgaacatggggtcccacatataatcaataagctattccagttagttttattttctggatctaagtggtaggtttgcttatttctattcagtttgccgtgtttattgtaagagattctcctatttattttagagtttccttttgaatactgcctttatcagatgattaaatttagctactaccctagtttttacaattcgtagactttattcaactttcttctctatatttctaagctgttgctaacaatgatgaatagataagccaataaccaagaatctaggtaaattatcatagtactagaaatttttcattagactgacaaggttacatgctcattccaagtaagcagtttaaaacttgtaagacaaaaatctagtatgcattgacttcacgtatatttttatgtagtagtaactttaaaaaaaaaaaaacatgaaggctaaactgaattttaaaaagcataagacattgtactatggagaaaccattcatgttgtcataggttagagagaaaaataaaataaataaccgcacactctataatggtcataacttcccattcctgataggctatctttcactcagtgtgtcaaaggtttaagagaggagaatgcttccccatcctcaacgtattgttgtctaaaatctgatatgttccctgaaaatcaaatctttatatatttcctcggatggtgtgaattagtctctgctacttgaatcctgtagcttgaacaggaccctcagtgaacatagattttaaataaccaatggaaggacccaccaatgaatcacactttagtaaatgttgattgaagaaggcagaattctaggatgactgttcatgatctacaactatttgtgttaagctctagattatcactttctttactgagtgtcttgcttctgaccacttgactgtttcaggtctgataggctacctattctttggtttgctaccattacacaacagaattagtgggatgtcgcttgcataatggcactatgtcatataaaattccttttctccggattggcatgaaagatttggtgctggtcttaaaaaaggcaacaataatgtggtgtgctaccttgggtgacagctatgtaagggagaattacagataaaaacctctagattctgaaagtgacctctagcaaaaagccagggaccttgggcatacacctacatggaattaaatccttctctaaaccagaatgacttctcttccacatatttgacttattgcttttgttttattctgctcttgtttttcttacgtaagcacactatttatttccctgtcacaaaaaaaaaaaaaccctgaaaactagactgacaaagtaccaatagattcaaaggtgttaaatctcatgatcatctgcttataaaccatcaagtctgagctgagcagaacccacaaattccatgaaagtctagagagcagcaagcttacttatgaagaggaagagaagtcagagagctacagagtaggacagaatagcatctgataagaagacacagagagacctgtgaagttctattaaacagtgactctggcaacaacccattgtgctggttaccactttgaacgtcagtacagaacccagcgtgtcttcctctggtgaagggttaaaaatggcacctgtaggaatgtgcctgttctgaagggagcccagcatttcctcctagctttgcaatctttgttctattttaatctgtatccaataacaggtgagtcaaagttcaaccatggtgtctctcttaggaaaagcgctctctttgtgcccttcttaggtctagtgaagtggaaaattaagtttttgccctctaagtccctgaaataggtcagaacagatatcaaacattaactctgaagcacatttaacatgatggcatttaaatgtaaaataaaaaatactgggttaaactctccctcgctctcccgactctacttctaatctcaatttatgcccatctatatgctccagcatagcacacaagagagagctattcagagagcaccatattttataatcttttctattataatagcaggataccagttctactagatttaagcaaaggaaaggatttactatttaatgtaattgaaaatttcagatgtggtagcagcttcagacatatgctgcaaagtagggcagaggatgtggtcatgttctgtctttctgttccggtgaccattgtgttggcttaattcccagataggccctttccaccccatggaaaagaggcaaattatcctggtgttggcgcccctcaaccgtattaattctaacagagaccaggctcatggtacatatcctagtcgatgtgactctgttggtctagttggtgttattcaccgctggccttgggaattagaatcaacctttcccaactacgtgggcttagaggaggcaaagaatgactcaataaaaaagcaaaagtgtttgtcaatgaatgcacattcagcaggtgagaaataatagatgacagaaataataaaggctaccatctccacatattaggaggaaatatcttcccaaatgtgagcacaaaaaacaaacttcaataattagttttatagtgtgtgtgtgtgtgttgtgtttgcatgtatatgtgtgaatgcatgtatccatatactcctgtgggggcctgaggagcacagaataccctgctccaccaagcttctctttattcctttgggcacgggtttctcactgaatctataacaaccagctgtcaacatattactcacaccccccaccgctcccagaacttgggttacaggtgccttcatggacacaatggtctctttatttgtacactgaagatttgaactcagggcttcatgtctattcagcaagcacttttctctattaagccttcattgcagtgccaccctataatcatctttgtaaatttaagctctataaatgttaatgtccaatattcctcccatactagtgaaaactctagttcagctccacagattacattctgctccaaggcaaacctggacttctatcttgtattatgagtcctgaaaaatgcctcatctgctgaaatagataagatatttaacatttccaaagttagatgactccaatgcaacataagactcctatacaacaagacaaatatttgtatacttatgtattacattagtgcatatcagtaaagtcatcatatgtttaaatatcataagatgaaaatgcacttaaaacacctaacccaccaaatacaataatagcttagtgacacaagaacacattgcatatcaagtctttaaccttggtgttgttgtggcagctgctgctactctctggccctgcccagtattctaaggagaatattataccacatgccactcattcaagaaagacccaaatccaagatgaatttctaatgaatacatatcaccttccttgtattaaatgtcttacaaatatttaagttgtgggtcagtctgtatataacagattctgccctctagtaagattctaagaataccaatatctcctagtcaatggtcaaatttcattattttggatgcaggggtgtagatgttataaggtggatgcaatctctcccatggatcacctgatttattttttccatggtcattaggagaaaagtaaagcagactaggagtaactgccttgactagcagaaaaactgacccagatactggtcacttaaataaagactagctgagagggaatagaccaatagttaattatcacaaatttagtgagaaaaattaaattatgaatgatgaatacagtttataagtctgtgattaaatggagcttcctgacagtatgttttataagtcttgcagtcagaggccagagaaatagaacttgctgctttctttaagaacccaaactatattcccagcacccacatagagtagctcatgaaatcctcttctggtctctaaggccacccgtgaatggcgtgtacttacacagacacatcatacatatattttatttatatacatatatgtaaataaaaataaagaaaaaatttgcaatcatacctaaaagtcaaattgggctttaaaggcaagcaataggagtgatttagccaacagtttaccacaagggagtttctgtttttcttagctaaagagccaggaatgcaaatggctgaggatggtctacacagtccacaggcatggcatctgaacttggcctctccatacatctgtggccagtggatggagaacaattgcaaacttgctttaatccccttaacatttttatcatcaaccacaacacttatattttcattttaatcatgtagctgtgttgccatttgtcttccacaaacctagagaagtcccagagcaccttgatctcttgacttttcccatgggaatgacaaaacttgagctaaaagagatccaatttgcaacagcactgtttcccagatactctgcctcaatcatgcctttcttctaatgtccacatctgggatatatattgtttctttgtatttttttatttcatttctctagctgctagagtctagcaggacccagtgttttgatcaccgtagtcaaggattaaagaatggcataaaatgtaaatgccaatgataattttctcactatgattatgatgggttgactatctaggagctaatctcatgatgccacaataatggtcaaatttcattatcaacttgcctgggtttcgagtcaactgggggacacagaatacatctatgggtatttttatggggaaagttccagaaagtatacccaccctgaatataggcaacaccattgcataggttggggacccagactaattaaaaaaggaaggagacagaaaccctaaagctcatctctctccttgctttctgattatatattcaatgtgactgaccagcttcctcaagtgcctgttgttataccttccccaccatgatggactctgtcttcaggcctagaacaaataaacttttccttccataagttgctcacaagggttctaatcccccctccccatagtcatctatcaatacctattttgatttgtatggcatatagcaacaattaataaacaatcactcagttattttatgacagaacattttcctctagattttctatctctatagggaactcagagtcctgggagctaacaaaccttttggatatggtccataagtgtgatggccctgactcccaaagaaggaatccctgtccttagcccactattccctttgaagtgattccctcgactcccagcttcaggctttagattattttctgtaacactgggttattcttacctactggaaaacaaaattaaacttcattatactaaatacttatcatttcacaaatgaattatttgaaaaaaagctgtatatgtttttttttattttgctcttatttcttgtgtttttatggtcttacccaaaaagtcactgcctatattgctattagcactttgaaaagatactgattcatgcttgccttgtgtttggatgcagtgtttcatttggaagcccaagatggcctcaaacttttcccacctgaatactcctgactcaccataccacatctgaattaagggcattaactatcatgcttgcattctcatgatcatgctgataggaagaatcaatatggatgccaatcaatgaatgaatgtatacggaattgtggttaaaaaaatacagtggattattactcttcagcaaagaaagaatgatgtcctctcatttgtaaaaaattcaaaggtaacaggttaagttacatgagactcagaaactcaaatgtcaacatctgctctccatgcacatattttaaaattaatagagattacaaccagctattttttataaacatacatttgtataaatatgagtgtgatacataaacatagatatataataggtaatgatctaatcagataattacacttctgtttccttattggtttatattaggagccttcagggctgttctcttatagttattcatcaaatagagaaaacacatactccaatgtatttgtaagtacttacactgtgtgctatagaacaccaaactactgtttctctcttaggaatagtgtttgtggtcctcccccatcctgctatacttctgttaatttaatcttctaataattggctattgtgtgtgagagagagagagagagagagagagagagagagagagggagtttgattttttaaaaaaaatcaaacaatttcccagggtaatttttcttctacagaagtctccattcccattctcttcaaaatatagaatattcaataaatcaagttaaaaggtcattagcatttgaggagctagacaggcatcctctgccttgatagagatagatagatgaataaaattaacgatgtagaaaatcaaattggggggaaagatcaactttgtatgggacaatgggtcatataggtgagcttatttttgtcatattttccctgtcacagctaaagagaagtacttgaaatttgaacctctaggaaagtgactttataagcatcaatattgcctatggaactgaaatccactaaataagatatgactgtgtaataattttcttaccaggacacattgctagagtcagatctgtgaatttaaagagcaagctccgcaaagtctgccaaatgtgcaaacatggctgttctccctaagccatttaagtcaaatctgctggtgtcagttgggcaatgtaagtcacttaaaccaacgactaacagacctagtgggatttctcaagaaatagagtcagctgccttctgaggcaaatcactttcgtgggacctgaactagctacaatggaaggccaacaccacacagatatattttaaccgctaccagagagagtggatgagcatggtgataggggagactttgagggttcaattatctcctgttcatttcattttaattgacaggtgtttatgagtttgacttacaaatgctataaactccaaggaaagcttttgaaattattttggacatttgcgtatgttggtttataaatgtaagggctgtgcatgtgagctcattggcaatcagaggccaacttgcacaagttgattctcttcttctgtcttgtggatcccagggattaaactcagctcatcaggtttggtgacctgtatgcaatgacccaccacaccttccccacaaagaaagtcttaatgggtgctcttttaaaactgtctctctctgaagctctgcttagcatggtgctattcatagtattcccttggccagctatggttaacatgaactgtgcgcattctaatcagagagatgagtttcggagaattaaaagcatccatcatagcacagcccttggatcaagtagctcactttctctaatggatgttctaaattaaacttctattttgggccatttcattcaatgcttttctgcagatttactttgacaaagacattcctcagttggtgctggagtcatgtcggttcacatagcttactgctggggcccagttacattttcccacacttttctacatttctttgtataataacaaccattccccaggctcagtgactgttgttcatttcctgaggactgtgcagaatgctgcctaaatgagaaccatcagtgaggaggatgtaagcgatgcctttaattgataggataaacatggaccatttagttttgctttaactcagacttcaaagcaccaggccgtgcatttgcttcgttttggcagacgcaggaagccagaaactcttcagtaggtaagaaagctatgaaaattaggcatctgcccaaaatcaaggatgaaaaataaacactgaaaacccatgttagtgtctattctgaactgaaaagtgaaaagtctcatgagagcatttgaagataggaaacacacaattttcaagaccatggtcttgagtccattttacagtagaggatgtggtcttggggccagagaacgttgacccttcttcattaaagcctcatagccctactgagatgaaacacagatctttgagtcctcttcctccttgcccactgccacactttagcccacagtagggacacttggctgggcggatttatacatgccctttggaacatctaacagaggccttcctttgagtagccatttaaaaggagaataaactcaattaggccatatcatttcctgatgacaggctgccttcaaagaccactttagagcacttttctacctcagtggcctctgattgctggtgcacagacacaggacaccttcacacacaggaagacaggatggggctatttttatactcactaatccctgtattttcagaatagctgcatgtgacatgatgctgagcagcactacagtgcttctcggagcccaactgggcttgcaacaacttagaagtgaaaccagagccctaaacccagccttcccaccagcccttgcactggggcctagagtctccttgggctctcttacctcctcaaagcttagtgtgtggtgactttttctctgattttcttagtttatccacaataaattgagagctaatttgcataatctgaaacaagggaatggtttaattaatgatcatatgagttcaatggactctttggctaaattacattttcattgagaattctataaaatttgatcaaatctacccctcctccctctcctccaatccctgcctcatcccatccaccattctgccctcccagcttcacatgctttgttttcaatcacacttagttcacttggtgctgctcgtattcgcttgggtgtaaggaactcaactgtagcatgaagaacctctctgggattgaattcctgaagaaaactgactctggttctgccagacaccagcaattgccacaagctcttcagctgggagtaggtgggcttcacggacccagccccctcttccatgctgggatttttgctgactgactgtgccagtcttgagtgtggagtcactgtctctgtggctccatgtgtaaaaaagactgtttgctgtagatgccctctacccttagccttgggtgggcccaccaataggtatgaaagggtgatagagatgtagcatttagagctgagccctctagtcccttgttttctgcatgttgactcgttgctctgtgtcaatcaccaccaaatcaccttttttcacacacacacacacacacacacacacacacacacacacacaaagccttctcctatgtggattgataggtgtattaactatgtgcataaatgtaggaacttaggatcagttcactgccatgtccatttaacaaaataatagtagtagacagcccacacatgcataaataatattgtctgcaatattgactaacaatttcacttcttcaaagaaaaatcagtaatcactgtgtgtgaaaggaaaccagagccacccaaaatggtggggttactagattctgcaggaaataattagatgaaagatttgagatttgggccatttgtttttattcatggactgtgagaaaggaaagaaatatgacagagagaagcagacatttaagaagaagaaacaaataaaaggaaaatgtcagtatttgctgcccacagcctggaactaaagaccagttcctctcagagagacaaagaaacacacctgcttctcccgacattcgttctgtcagctgctgggatgctcagaccatcccggttttttatctctccataattgtgttagtgcttcagccaggacgctgtggcatttggccaaggtttccctgcatggttgctttttctacaaagttaaagaaggaataagataaggtttaaagtaaccccttcattgttggttggtagtgccgcatgcctttaatcccagcattcggatttctgtgagtttgagtgccgccttgtctacagaatgagttccaggacagtcagggatacatagataaaccctgtctagaaaacaaactaaaaaaacaaaacaaaacaaaacaaaacagcaaccccttcttcatgtttgtatattactgaatgtgtagggagtctgtgctcctagaaacagcaggctgctcacttcccttagcctcccaggcttcggcactaggtggacagagggaggcaagagaagatggttgttagttgattttttccatttttgtttcttcattgaagtgagagtgccctgtagtctagtttattcgtttcatttttcattggcttgactgtgcacagtcacctaacaaaagaaacaaccaagggctgaaggattcaaaaataaagaaagaaggggccgccagtctggcctttctctttagctggaaactgcttgaagttaattgctcacataagaggaatcactgctggtgctgtaattgaatttttatggaaataaacaggtggcagatttactatagctgtggggatggtgagggggggtgagatgctgtagccacattaacctgtttaatttaatagcttcggtattcatacagggggaaaagcaaggcagctcatggagtcagttggatgccaaatgtaaataactacaattacagagcatgcccatgtggttgagcaaaaaagggcaccgggccagctttgacttagtttctgagcttattaattaagccactagaagtttcacaactcttaacctatgaaggaggcccccaaaaaagaccaagagaaaagtacatgacaaaggggaaataggacagcagttgacaaaggatctgctcacaggaatggcacaacccaagttcttgctttgtgggaaccttcattactgagagggaagactgcacttagagggatgagtgaaaagctagctttgcactatgctgcccccaagtggtctagtttgggtaatgcatatttttattctgagaaaaaaaaaaaaaaaaaaaaaaaggtcagttaggatacaaatgccattgggttattttcctgcttggcattcacttttaagccaaccaataaaaagagtttgtgtttaaatttttggttttttcttttatcacaaagcatgttaaactctctgtactctctatttttacttaaagaatgaaagtgtattttaaagaaaaatgcaacttctcatgaagcacttaccccaggaaatagtagtaaatttaactaagaatcccttgtcctgtttcttaggctcctgggtgagcagattcccaggtgaggcacttaaacgaagccatttgtccatactgaagactatatacacaaatgtggacatgaggctaaagcagagattgtcaaaatgtcacttgaaaaaaaaattctacatgcttttggagtcacctcattgaatacccgagattataggatacagagagatccagtcaagcacaagtagatttgtgctctttggagatttgtgggatgttgtgttgtgttttgttttgttttggttactgtagaccaagctgtaaagaaatgaaaactccgaaagtgtgctctcttttctatcagtcttgtgatgtcttttttattaacttcttaagtaagtaatcttatccagcctgatgactgtttcccctccctcttctcctcccagccctccaaccccactcccccaaactcacatccagttcttcccctttctcttcagaaaagggcaggccacccatgtacatcagccagccatggcatatcaagttgcagtgagactaggcacctcctgtcctattaagactggatgaggcaacccagtaggaaggaagagttcctagagcaggtaacagagttagaaacaacccctgctcccactgttaggagttccacaagaagaccaagccacacaactgtaacataagcagagggcctaggtcagttccatgcaggctccgtggttgttggttcagtctctgtgaggccttgacagcccaggttagttgatgctgcgcattttcttgtggtatctttagcctctctggctcacataattcttcctccccctcttccacaggattcaccaaggtctgcctaatatttggtgatgggtcaatgcgtttgtttccatcagttgttggatgaagcctctctgatgaaaatagggctaggtaacaatatataagtatagcagaatatcattaggaatagtttcattgacttttttcttttttccaatcatagttggttctatcctaggtctcttggctatccagccctgggtcctggttctcatggctgggttagggctgggctacctctcatagtatgggtctcaaactgggccagtgataggggaagtccttctgtatatatgtttctctttttctttgatgaataaaacactgattggctgattggcaaggcaggaagtatagacagggcttggagatgagaattctgggacacacaggcaccaagtacttcagagaggaagatgggcattgaaaaaactagttatggagttgctttcaatgaggcgagactagccatttgggcaagaaactgctcttgcctgggctgtttgactgtatgctctataagctggacatacaggaccctcaggagagtgactgctgaaataagatgggacagtcatgaaagactcctgcttcatagaagagtctgccagacattctgcaagacacagaaaaaggactgacaaattgccaatacaggtggacaggttaaaatttcatgattcactgagatgtctgccagatacactaggcctatgggttgaacatggatgccccaacgttacacagaagaacttccggtgactgtccaggcggcaagatgtctctgtctgttctagagtttatatattatccttctgtggtctttgatgaagttgaagacagataatcacggctatggttttccttagttatgataaaggataagttacatataaaaccttagacccacaaagataggatagataacagaatattttctttaaatttttccaaatgttaatttacttaatattgttagctatggttcttacatgataactgttctgttatatataattttactatgttcaagttaaaaacgtttctttttatttagacagaaaagaggagatgatgagggaagtccttctgtatatttgtttctcttattggttgttgaataaaacactgattgactgattggacaggcaggaagtataggcagggctaggagatgaggagaatactggcaaaaataggcagatggagtcaccatgtagctgccaaaggagtaagaggtccagacccttctctggtaagataagaccatgtggaaatacttagattaatagaaatgggttaataattaagacagagctagcccataagaagccctagccactggccaacagttttataattaatataagtcttcgtgtgtttatttgggctggagaggtgggacctagcaggacaagaaaaattgccagcaacagaccagtctttgattggccactcccataacttctgtaccacctttgtctcaatatgtattgtaggcaggacaaattgcaggtcagagattatatggctgggttggtgtcccaatcactttagtgtaagtcttgcctggttacaccagaaggttggtcaaggctctgtatctccaatttctaggaatattacctagagttaccccatagatccctgaggatttccattgcaccaggtttttcaatcattccagagctgcccctggttccagttttctttcccagtactgtcttccttcatcttcctccacctgatccctcctgttcccatgcccaccttcccatctcaacctttcccttcatccactttgtgaagtctattctatttgcccgtcacaatgagattcctgtgttccccccaacaagccttccttaatacttagcttctcaatatattgaaatctttgatccacttgaattttggtattttgtgttggtggtggtgatagtgtgtgtgcatctgagtgtgtgtgtgtgtgtgtgtgtgtgtgtgtgtgtgtgtgtgtgtgtgtgtgtgtgtgtgtctttcttctttttgggttttttgcgggtgatgtgagggtatttattacctgttttttcaagggtataattaatctccttggcttggagttttttcttttattaccttctgtagggctagatttgtggatagacagtctttaaatttgacattgtcatgaaatatcttgttttctttatttatggtaattgaaagttttgtggagtatgttagtataggctggcatctgtggtctcttagagtctgcaagacatctctccaggaccttctgacttttagagtctccattgagaagtcaggtgtaattctaataggtctgcctttatatgttatttggcctttttcctctgcaaattttaatattctttctttgttctgtatgtgtagtgttttgattattaagttgtgtgggaactttttctggttcaatctttttggtgtttggtaagcttcttgtacatttataggcatgttcttctttagtttaggaaaagtttcttctatgatttagataaatatattttctgggcctttgagccaggattcttctccttcttctatttctagcattcttatatttgatcttttcatagtttcctggatgctttgtgttagattttattttatatttaacttttttttaaaccaatgaacctatttcttctattgtattttcaacacccgagactcttccatctctcatattatgttagtgatactttcatctatagttcctgtttgtttacccagttttcccattcccagaattctatttgtttttgttctatttgcttctgtttctatttctaggtcttgaatggtccttcacctatatgtttgctttttttcttgactttcattgcattctttaagggatttattgatttcttccaatttttttgtttgtcttttcctcaatttctctaaggaattgttttcatttcctctttaaggacctctattatattcataaatttggttttaagattgttttattgtgcttcagatgcattggattgttcaggtcttgcttttgtaggatagccaggttctggtggtactggattgacctttctgtggctaattgtgttcttacaatggcatttagacatctgtgtttgggttgattataggtgtaggtgttggttctcaaatttgtttttgttggatgtgcattttgttccttggtttttatttcctctctggtcttcaggcctaagtagccaggggttcttgtgactagtgagtctccaggtccagtaggctgcctccagtggggtttttgcatccagcaagacctttggcatttggggtaacagcgttgtctctgcagttccttgtatctgtgtggcctctggggttctggatacctgcttggtctctgggattcctagtacaacatgtcctccagtatagcaaagtcttctgctgatgttgtgtgcttgaatatggaactctgggtgggggtagatttgggagctgttgttctagtttagagagtgttcgctggctctgggcaatgttttcccatgggtccctagaattgacctggcatcagcagatgtcttctgctggcattgtaggctggaatatggagcccagaggagggtgttgagtctagggttattggttgggctttaaaaagtgttagcatgtggcaggtcatgtcttacctggggtccataggaccagcctggcttccagtaaaggatctgaggtatggagtatcttgtaatgtctttaaggtcatcatgtcccatgaatacttgctaagtgcatctttcctgaaaaacattagcttatctgttatagcaggctcatttcttacagtcttttctctgtaccacaggatttatttttttgtacagatgccagtaatttgttaatgtacctggtgaacccattgacagagcaagagctccacattcatttcattattaagcattatgatagatatataataggtagatagatagatagatagagatatatgattatagataggtagatagattagatgaaaagattacagataaatgataaaaggaccagttatagataaatagatgataaataggtaagcagatagatgatagatagatagatagatagatagatagatagatagatagatagatgatagggatcatagatatatcttgctgtgcaagccacaaatacacacacactacttcactttttctattacttcttgcctcctatcaatcagttactaccagatcatctgtagtccattcatacctactcctaggtatcccacagccctccatgttcctgcatccatacaataaactcttacctggattactgacatacttggtatcttatcttaccattcttagggcacactcctaatgccacactcctactgcagccagtgaaaactttaagtatgtaaccattgctccttgcttaaaactgtgaacttaactcctcatttttctgaagataggatagctgctgaagtttgacaactctttgctgttccattccttcctctcacatttttgttcccacccttatcatttcagtaaggctgttttattctacccagagactccctcctgatggtgatttggcttcctctatctgctttggtaacacctgcctccccctgagaggtttatctgcaaatgaaaggcttttcgaaaaagccctgttccttcctccaaaactccagtgtatatatacccaccaataacaacacagtacagggatcctttcctggttttgttttgtggttcttttgttttgtccatctgactcaagatagagttatctgtacaaagaatctcagttgacaaaatgccagcatcagattactagcagtcaattctgtagagtcttttctttattaataattggtgtggttggtggcactcccggccaggttgtcctgtatcatataaagaagaaggttgagcaagccacaaacagcaagccagtaagcagcacctgaccatggcctctgctgtagtccctgcctccaggttcctgttctgcttgagttcctgccctggcttcctttgttgatggactataatttaaaaatgttagccaaataaaccctgtcctctgaaagatgcttttggtcatgttctcatatcacagtaattgaaatcctaagataggttccctgtagcacaagctcatagaattatcttgaacagcatctattttgtaccatcaaaacatctgtactaccaatgaaaatggcatgccagaaattttcttccttattgacctcccatacacagcatgtgaatcttgactttgattgatattgagtaaaaatttgttcaattcgaagggtggtggttgcacatgcctttaatcccagcactcaggaggcagaggcaggcagttctctgtgagtgtgataccagcctggtatataagagctagttccaggacagcctccaaagccacagagaaaccctgtctcgaaaaacaaaacaaaacaaaacaaaaattaaaaaggaaaatttgttcaatggacacctgatatccactttataattgttcagtatctctacatctttaaaacttctacatattcttttaaaactgggtgattgtttgattgtgactgtggtgcagggagtggtgcaggtccaagatttggcatgtcctaggcaagtcctctacgctagagcttcacttacacactgaatgcctgaaatagagatatgagaagaactggcaactcagaatctttcaagctctaaaccatagttttcagttttgattcgcctataagaacgatttgctttagattcagtcttttagaacatggagacagcaactcactccatgtttcaggaacccagatggcaactctaccaattgcttaagcgacccatttgagttataaagtcagaacaataatcacacaagactcaactacctagaggccaactgagatcgaaattcaattaaatatccaagtacaattcattattctggtcagtatagacagtgaaattttcggggctgttgaaatcagggtagcttaaagtcatagtttaacaatgccccagattgctggactttggtggtgctcgctcacctttaatcccagaactcaggagggagaggcaggtggagctctgcgaatttgaaaccagcctggtctacagagagttccaggacaggctccaaaacaatacataggaaccctgtctcaaaaaacaacaaaacaaaaaaacaatagcctagatctccggtcacctctctctcgcagttcacatggggctgaatgtattttcaccttcttgagtcttacagttgtattgcagtttttttagcatactgttgcattctgttcacacagagaatagcccgcctatgtagccagatctaggatatattttaggtgcgtgacctgaaaagtaagcagtctattttggtcacaaagtcaaaacaataacatttggtacttgaacatgtttatgtgaatgttgacccctaaaagcacattacccttagaatgtaatatctctgtgcatgatgcttaactggtcatcgttataaaggagcactggctatttaaaatggtttctgcaaaaggatggcatgtcacatccattgtgcataaatccaggacaaagaatagactgactacattaagggctatttatctgcaatgctagtaaatacccagagaacccccttctaaggccccgggggaagattgactgcacacacagtgctattactgctgaatccaatatcaaagagttcttcttttggatgtaactcacatctgagaattggagtgagagtgtttaaccccctatcatagtggcctgaggaagacctatgcttcccaggggcgggtagggtggagtgttttctataatgagaatagaaaggactatggcaccatcacttctttcagtgaagggtctaatgactaccaaagatttcttcatatcagaccttaaagaacaagggcttgcctgtggatccttgtggtgaccataggtagtgccagttggtggttgctaccctggaatggtctcatcctccatgccatcagggaagccacttgaacaaaagcatctatctaccagtggggtaagaagaacaggaattcaaatcctatccaaaactgtgcccctttcttgaccaatgcacttcccaagaccttggcaaaagacatcttccagacctcttgagatcaaataaggggaaggtattttgaatgttattcaccttagaggacattcttgtcttctgaaggactcctgggaactcggtttcttatccaaagcctccattaaatctagcctctagtcaagaactaagccataatcagactccttcccaccactctggctatcacttccattgcagcatctcagaaagactagcccctttgtaaagtctgatactgagatatgcccaaagtcaattgtgcttagaaatcaccatcattcatatacataactcccaattttgtcataaaagcaaagaatctccagctagcttttacaatgctagtgactctttgacacgttgggatctgcccactagttaaaaccctgaaggtaatgaggtagatgtagagcagtttcaagatgagctgattttccctcccacagttggcccatacattaatttacttctctatcgctgtaataaagcactcaattaagaaataggggtgcaaagatttatttctgccagaataaaaggagacatagttcacataaggtcagctgtgccagcaggtggctctgtacaagccagcatgcgagtctgagaattaactcttcaactcttggtattacagcagagagagacagcaggcagggagcagggacagagtgtagtcgctatcatgcagtaactcacctcttccaggtagatgctacttcctaaagtttccacagaaactcaaagcagcaaaatcagctgcttttggaccaagtgcccaaaccatttcacatttaaaccagaactccctaaaagatggaaacccatccaaaaagcagaatgcacattttgatgctcccaagaaaagatataaacttacaaatgttttgcagtgagctctccagcaaaagaggacaagtgatttttgatttgtagttctgacatctttctttcatgagaagttgtctacatgatgacatcaccaaacaaaggtggaaagaaataaatgcagttgtcttctcagagccaggaagcctggaatagcaacggggagaagaggcatgcattcatagcattctcagtttctggaatcactcataggatctgattctgaagttcagcatccctcacatttgtagtcattgtcacttttatgtgagagaaccagcaggttattaacagcaatgttgtcaatgacaacattaactctaatctctgagaaagacttttaactatgtagaaatctaaagtagtggagagaatggaaactcctggtactgttagcattcctgaagtttggtttttgccacactgaagaactttgagataaatttatttaccatcttttcaactgttgattgttctcagaataaccctctgaaactatgtacatcttttatttgtttgatgacaacgactacttggttttctagaatgccttgccttaaataggtatttaactccatgggagccttgtatttcagagcccacagagtctttaattttccctttccccaccatatgcatggtttctagggacaagtccacagagaaagatgaagtgtcactgagtcccttcccttcctggaaatcaattcctcgaactcacatctcacaccatttttcctaaggcttcaatacttagatgcacaaccccactaccatcttttgcatcagaaatgtgtgtaaagcaaaagaagttaaaccaaacatgatataattaagagaaaagggcgaattgtagcagaggcgttcgctcccacaactatgtagaagttggaaagaggtagatgagaacaaagggaagtcagacagcaggaagctctgtgtttagagcagcataaattctacacctagtgccatcaacctgcttccagctcctgtggattctaatgtgtttctctggataatttcttttctatccccagatggaaccatctcactgccaagcctagactatgtgcctgtgacctcactgtctaagtggagaaaagcagtgcatcggatctgtttgtgcttatccatgacacccttcatcctgccaagaccagaatacccagggtggaaaaggagttccagtgccagatggtttaacaccatcacaactgcagtcaatggacaggagcgggatgctttcagaggaaaatgttagtgtccaaggagaaagtgagactcccataaagagaggattaaattaagggaagaaaaatgacaggaaacagaccaatctttgaaggaattttgtattgatagaagggctagtagctttaaagataatgcaggtttagaaatattgctcatttttccattataacaactaaatacatgtcaatgagagtattcatttaagaaaaaaaaaagctctgcagtcattaaggggataaactgatgaatgactgcatatgggtaaaattaaaaacaatgcatatagattaaagagttatttttccccttcacgtaggacaaatggaaagatgaataaggcaagaagaagaggcaggtagccattgctcattaaaggaagttgggacacttggatctttcaaccttaataggttatacattgcagatcaaagttcaaagaatgaagcagaatttaaaaaaaaaatgaaaggaaggaaggaaaccttgatgactggaaaacattaagaaccactactataaaaagtgataatgaattaggcatgaataaaagatctagtggaatggagagccacttcctatctgactgcctaaaagctgtgtaataatagtcactgacattgggctgatagatttttccattaggaaaaacagtattctctccactaaactatccagactctagtaatcaccttctttcttttgatgtgattatacacacaacagatgcaggagggactctagacacacactcaaacacccccccacacacacacacacatatacacacacatgatgaggcacttttgacaggttataaatgaggaacaaatacagctacctatggcagccttgtatgtggttttgtggtgtctttgatgcttattcaaggaaccagaatttaaccacctattaagagtgcagaacaggcctcagattcacctttgtcttctgaggtttgtcccctttgctgagatgattccagatgcattttggtaatgacactgtatcaggcttctaagatcaatggcctgagctcaatctgctataggaatcttcccagaagaaagggatgtttcatcacgcagagtcattcatcctaggcctcactctcctgcttctgatcttccactgttaaaagcataacacactggaggaagattgtgctatatttcatgagtgctctgtgccgccaccaagggacacttccatctgttatttgctctcagctttgcctactgataaaacaggaaggacagcttgctgatgggctctttgaagcaaatggctccactctttcctgcaattaatgtttgtaaattatttctacagtagtcagcaggtatggtaccacgatttcaagattagtttcaataaatcaagagcctgccttccttctgagagggcctccattacaatgagactcatggttagtggcatgctctagccttgatgaatattgctgtgtgtaatctgatactctcattaattctgtcaattaccattccctcgtgggaagatatgaaggctgtatgttgggttgttgaaatttcacttaatgtgtagtatatgctgttcacagaatctggtatttaggacacttcaaaattccccagtaagttaatagccctttggctgctggagagggagatggctcatcacaacaaagctgggttgtaatggaagtaattttgggttttttcccaggattactctgttgtttcagtcataaatcatttttagagtagagaaataattatatattttccagccgctgcactattttaagaggaatttctctagatctatagtatgaacctctctttctaaattgaaaaacattcttttacttaaatttcttatttttagtttaatggttcaaaaatatttgattaaatatgaccctggttttgttattgtttgttttgtttttttttaaaactgatcatttccttattttctctaatggtctattttcaagggggaagatggccacttaaattacattcagattgccactttaaaagtttagacaagggatttgaacttgacaagcaacatctgttctttcagagtagaagcacaagaaacagaatgatagtttctaaagacaacccaggtagagagagatcactgagcaaaagagggggcattgaacagctattaaaagcctatggtggcaattacctcttcacctgggtctgagttcagttgagaacttgaactcttaccaagagaaaagatgaaggggaagataccaagacatctggtggcaaaaagtatcacagtgcctcacctaaagacaccgagtgcgcattagtaatgggaaatacaaagaattacaggaatatgtggaaagaaaattcagcatgaagctcccacattatatgaacaggacctttctcagaaaaagaattttaggaagtacaagccattcagaactgtgtgtgcactctgtggccactagctgtgcttcacagtagcttatgaaagccatggcctttgcctctgtgttcacaatactgagagtaaactagaaagcatgccagacattaaagactaaactagttgtgtgagatatggcacatgaatattaaagagtaatagagtttattactttttaaaaatcaactgtcttttaatgagaggttagacaatcctcttctgagagaaaactatataactactaaggagtgaaaagaataaaacatccagagaagctttccttatcatcaaatcagtctctttaggttttttaacttttcaagtacctcactgtccagtgtatgtgggcattgggaatagcactgagttaagtggaaaagaaactgtaaactagcagaacaatcatgcagaggcaaggtgaaaggagaaactgttttggattcttaagtctaaaataaataattacaaacaaggcacacactgttgttaaaaacagcaagaccaacactgaactgcctgtgaagaataagagcaaagaaaacattttgctactgaatgtcagcacctttctgtggacaggtaaatgagaaagtattggaaatttggaaaagcactatggacattttattttcaagtcatggaagatccagagaatgggtagagatataatattgagatacaggggaaggggttgaatatcaagcatggagccaaagtcttcaacaggaaatgaccaatctgttttcagaattcctaagaacatacattggggagatagctcagtaggtaacatgcttgccaggaaagtaggaggactttcttttctactgtccacacacatgtaaaatgtctaggtgtgccagtgtaaagccataatcccattgctgtgaaagctgagacaggtggacccccagaatctttgaccagacagtaaggccaaatcagacagctctgggctgagtgagagacactgtctcaaaaattaaggtgacatattgaagatgaatacacgtgacatcagtcttgctttttcacatgtatgcatacacacatatgcacacgcaccccacatgtacacaagcatatacacatgcatgatatatatatatatatatatatatatatattggaatattggaatatttgtacacggtgtgaagatgtgttactgtgattggtgtaataaaaagctgagcagccaagctgggcaggagagataggcaggacttctgtgcagagagagaaagaggagataattgaggcacatgggaaataacaatggaacaaatcagacatatgagacagaagaaagttaattgagaaacatgatagaatgcagataaatagaaacaggttaattaagttataagagctaattcagaaaaaaaaaggcaaagctaagcccaagctttcataattaataactttccatgttattatttgtgagctgttggcccaaaggaaagttcgactacacacacatacacacacacacacacacacacacacacacacacacacacgcacacacacacacatgcacacacgcacacacacacacacatatatatataatatgaataagagaatgaatgaatgaatgaatgaatgaatgaatgaataagatggagaagcagttgagtaaggcacccaatgtagacatttggtttccacatacatgcattctaacgcatgaacacgtgcaaaatgataatattacactaaagttagatctaagaaaatacacagaattgaaaagacactctccattcttccagtctttataaaagatgcactaccatcagcttcatacactttcatgccactcttcttatgggcctattcatgatgacctgtcctagcatgcgccgtgtaatacagtatagaaatagatgcatacactcattaaatgggccaaatcacagcatggtctttttttcccagagttgggtactttgattactcctacatttaatgagtcaactttagagagaaaaacatgttcttttttctcttgaagaaattaaatgcctgtttgtagagaactaaaacaatcaaagcatgtactgtgttattttcctatgaaagttggtgtttatgagggactgggaagacataatcactagctactaattacagagattttttttttgtcttttgacagggaacttaaaagaatttctagcactttatcttagaattttcagttttctaatgaagacacaggaaagtgggcagcacaggctggtatgcaggaagaaaccaagttcttcagtgaaagaaacagcatgatttgtaaatgacaaagaaatagaaccggtatactttaaaactacctcaagcctagaggtggtagcctacaccttaaatcccagcattaggtggacagaggtaggtggatctctgtgagttccaggacagcctggtctatagatgagttctaggatagccagggctactcagagaatacttgtcttgagaaacaaacaaaaacatagaaaaaggaataaaacaaacaaaaacaaaacaaacaactacctctaatttatatgggtagttttcttcatttaaccttcccaagcaagtaattactccaatgataactttcttctaagtattttgaaaatacaactttcagagtcaacatcgtatgcatttccacattcacaaagcagacacatgtaatctgttatatgataagatagatcctgcttcttcttttgtcacattacaattagtattttttactcaaaattagtattccttactcaaaatatttgatgtctcctcatttcattaatagcagcattcaattaagttgatatatatatatgtatatatatatatatatgtatatatatatatatatatatttctgtatttagaaccaccaatctaaacacagacataagccagtaagattgctcagagggtaaaactctttggcactcgtgttcttatatgtacattcgaagagagggggagagaaagagagaaagagagagcactcacaatagcagtaaaattaaaattttaaattaagtacaaacattgaaaaatttgcatcatgatgttctacagagacaactggaataaaccaatgaacccaccagtccactcttgttttgctactgactcagacacaaggctgcctgttaccactagataaatacttaggaaggaaagtgcctacacagttcagatgaaatatcacatcttagttaacacatttgggctcataaatgccactctcaccagctcaatactagtccaaactctgcagttatcttggaactagttgttaatcacacttggcgtagttgtttgcaattcaaagaatggtaatgcttctctgcttaagaaggcaagaacttgatgatcagaactacacaacttgggtaacctccaaactcaaaattgagaatttcatttttttatcattatgaataaaattgttgtacttttaagaattcttttaaaatcgttaagaatttttaaagtcctggctactggaatggcaatatggccaacaaacagtgatgaaaagggacaaaattcctttcttgtaaacatttagataggtaatggtgatatgtagtaaaacaatccctgagtaggttatcacagtattcccataattattgttttcaatattccctcatgcctttagaaaggatgttggcaaacatgagtaaagctagcttgtaaaataactgtgtgcattacacatctactgtatgctttattgtgatggaaattattactatgtttggaaaaggtgtcatgatcttttagaggttacatgatcttcagttaatgcatgtgagggagacattgccaaacatgttttcaagattagtaaactgaagttcagagagattaataacttcttggttaaggataagagccaaaatttacaaatcttactcatgttgactcttttttgggggaaggtgttatttgacttccatgtactgatcacagaccatcactgaggaacatcagggaaggaattcaaggaggagcagaggcaggaactaggaggaaagctgcttactggcttgttcaaatcccctttttacacaacccatgctcacctgcctagcgatggtagcacccacagtgggctgagttctcttacatcaaacagggatggagaaaatgacccaccaacatgcccacatgccaatcttagagaagctgttctttaattgaagctccctcttcccaggtgactctagtttgtgtcaatgtgaaaaaaaacaaaacaaaactgatccacatagactgtaaatgctctatgatgttggttctcactgtgtggcacattctcctacattgctaggcccgacccttcagagtttcaaactcagtaggtctagaagtaggctaaagaattaggagttcttaatttcaagtgatgctgctgatgctgggacttatactttgggaaccattgttctacgattttttttgagtcttttttagagttgtgttttgtttttaattttatgtataagagaatgcctgtgtaggggaatgcacatgtcaatgtagttcacataaagtccggaacagggcatcaggtcctctggagatggagttaaaggcagttaggagccaccagacatgggggctggcatccaaacttaggtactctgcaggaggagtgtactcccttaacttctaagccatctctccagccactgtctcccattgactatttctgaaactagtgattttatttgttttagctattgaagttttattaacaaaacttaatttgtgagagttgacatgtataaactgttaagtatcagtttaagaaacatgaggaaacaatgtttaagtctgatattaaattcttgaatcctacttcttattttaaaacatgattgactatttttcccctgttcaattctcactggaatggcatatgatacgtggagaatctgcagtctagtcccaaatggctagaggacaaaagctgctttcatgtcgtttctaagcagaagctgaaaggccaaaaatcactggagaaatttgctagggtgagatttttttcagttcaattttattctccctcgaggttcaaacaaacttcagataatcatcttgaacttggtgacgaaccaaactcagattcagactgtggcttctcagagggtcagcccttccatttagaataaggcacagcttaaagtgacaagccaaatggggtcaaatgttcaatacttggtgaaaggctcagctgtcgtattgaaacaatgttgacaagatggcaggctttaaaataaatccctgtggaggctattgatatcattcttgccttcccttctgtctcctagccagctgcttctttctacagtactgccaatcatgcccagtgcttgctagaggcagcaaggtttgtacaacatctccccgtgctgggtccagcaacagaagctagctatgggcattcatagaaggtgacattcttgattcctcagtacaagacaaagtgagctgatatacatctacccaatcaagcaggtacagttaccatggtccttacttatcaacagttaacccttttgaatcaacgtcattgaataaagtgagatttggtcatggtgatttgttcaaactagtccatgttaacagtttgaaaataatgagtaatttcagttagggtacatttttctggaaagcaagaggttatgaatcatgaagagttgggcttagagagatggctcagttcaccaactgcttgcctggcaagcatgaggacctgagctcaactcctagtacctgtgtgaaaagctggcttgtgtggtgcacacttgtagtaccagagctggattggtagactggaagttttctgaaacaaacatagaaagtttagaacaaatcagagtgtccaacaatttttttattcaataacactgagtcagaagtgttaactgctggtgagtgatgcccatagtgacaatagctgcctctgaatttttggcagatgtgaagaaagtagactaattggcaagttaaaattaagataccagttacaggtcactgagatgcatcagatgggaaagatgcctgattccaagtctaaagatgtgaattcaattccttgaacccacatgatagaaagaaaactgtcctctgacttccacacatgcaccatggcatgcatgtccacatacatacacatatatgaacacacaaaatactaataaaatgtaaaaataatgttaaaagtggccaatgaagggaccctgtgttttcaaaaaaaggtgcatggcactcaagaatcctaaggctatcttctatgtgcgcgtccatatgcacacacacacacacacacacacacacggcaacacacagatgacaagggttcagaaacatatatcaactaatccttagaagtgacatcatcatctagtaagcatttagctcagcccactaaagctttgaacttcacatcactgacagttaatgtcacctgtcagcttagctgggtcaactgactcccagaacactgggtaaataaatgccataatatttaacgtatatgtgaacaggatttcaaaagagatttgcacttgatgagctaagtaagtagctaaactgattcaaagagggtagcaccatccagaagttccacagatgaacaaaaagatggaggaaggttgagtcacctctccacctgactgctgatctgagacatggatcaactgcacttggtgtgcctaccaatgtggcctagaattaaaactatcagctgttgatctctcatgcctttgaacccacagtagctttcctgggtcttcagtgtgcagacagcagatcatggagctattcagtgtgtataatcaagtgagtctattccttataaaaatttcattgtttgtaattgatatatgtgtatgttattgggtctgcttcctgggggactccaactaatacaatgatccctcaacgtatgcagcgcataatcagtgacacattgagatgtatccatgcctgctgtgaggaaaattaactttgggatacactgttcctgtttcaaattatgtcttttcctgtaaatgtaatgtaggagactaacaacatcataggtataaattgatattgggattgtttttgatgacttggctcacattgtgtttgcttttgaaatctgcatagcttctggtcctcaatgaatagtttctggcttgagtcccaaggagaatactgaggtggattgtactttggggtaagagattaatttaaaaagttgttaatgccatagatggcaacatgatgggaaggtatgatgagagttctggtccacgaggcagagagggatccccttcctacaggtgtcataggaaggaggattcatgccatgtaattgatgagtaacatatcgctcaggtctgccaggctgtccctggtatccaggtaagtgtgctactctggggacagaactgagggaaatctaactgaattgtagccattggaagcatgaggacacaacaatgcaggctctcttctgatgtccacaagtctggcaaactgaggtctatgatttccttgggatatgatttggcttttttgttttcagcaactgtaagaaagagtctattgtagctcatgttgtttgttcttgctctggggcatactccaattacaaagggtgtctctctaagagatccaagcaaatgaggatgcccaatcttgaccctgaccttcagaaccttgggcgagagtgaacatctccatttcatatgctatgtcagatattttatgatggctatttgaatcaatctaatataccaggccctgtcataatccagagttggggaactactgtgtacaaattttgttcttttatttttgtttttttcaaattttgttctttaagaattgttaaaatattggttgttggagtggcatgacaggcttttcagaaggaaacatatagtacttatttgtctcttgcaaacatttatgaatcccaatggtaatatttggtcatacagtttatcagaagcatgttattgcattactggaattattattcaagaattattattaaaaaccctgagaaaagctttctagaataatctcatctttaggctagtcatctctgtacgactcttggaatattaaagccaattaaaagattagcacatgaagggaccctaatgcgatttgatacagttgttcgctacactgtggcactttcttcagagattacctcaaaggatagcagaacagatgaccactcctgctcagcctccataactcgtgctccagctttatgtgtttgccctgtagccctggcttctttcagagaacagcattttgcttctagcaatgaagtaaaaacaatttgtggctcttgtttacttatgggcaagtcagcaacttgctgggaggggtgacctgattcggttgctactgcttatctagtttcaggtcagagttgcagtcttcctgctcagtgaggtcagaatgggtcacatgctttcagaagagtccaactctgctccttttgccagcatcacccatgtcctcttttcttgctaagtttcctgctcacatttcccagcttaaatctatggatcccttttggaatccatgcctcattcatccctatatacaccaaattgtaggatattcagagaagcatgcatgaagaaactgaattcagtaggagagacaagacataagcactggttaagcactgatcttaagttgggatcaccattattattattatgagaacagtgtcattgtctgcctgtagactatgctgtattatctctgacaacctgttgttagaatgtacatgaactctctgaattccatcctacaagtatcttaatatactgactttgtgaacatcaggaatgtgactgaactctgcactttaggtacaattgttcctcagtatacacgatttccctcacagagtagatttaaaaatgttgaaatcccatcctacgttatctgatacttttgtattccccttgtacctaacaaagagacatgtgtgtggcaaacaatctgaaaatcactggctagtgaagctagaaataaaactaacacccttaacctccgggcccagaggcaaagagtgaagagcagagagagggcatcaacaccagataaccacgggagagctgcagccttgcatgacctccctgctgtgcttaccgctaatgatcagatcttccttctggaactttctgttccctttgttttatgtatcatggctcttttcttacctctttgaacattcctgctaagtggcattttgtggttttgctgaccccccaaagattttcgtgtgtttcctacatttttttcatggcatttctttctttcttcctctctgcttgaaatactcatcttccaagactcagtttaaataaaatttcctgtttaaaggaatccaggttggaattatttgtttctttcttgcttctttttaaatagatatatttaatttttcatgtgaaaagtttcttttgccctatttttaatgtaacccagtttcctttctcatcaactaattttgtatgtgtactcccaaagatatttatacataaataagcagagataagcatattttccctctgctttaatgtaattgatagggtgtgacaaagtatgttctatacatttctgttttcacttaattatatgtttaagagggggttgtttccatatcattccctggcaactatgtagttccctactgtagcataatagcatgttgtatttaatcactttgttaccaatgcaactcagatggttcctaaattttactattataagcactcatgaaatgaacagcattatgcacatgccaccttgcaaacatataataatatgcctccattattaaatagaaatttttctttgcgaagtataacattttaataaattttcgatttttcttcatacatgttgtactaattttctagcaatgttgttactaaacctgagactttataaggttccaaagccaatactcagaaaaggagaacaaataggaaggaaatctgttttactcatggctaagcacccaaagaagacaagccttctccacaaaggcaaggttgggaactcaggcatctcaaaaaggcaggctttcatgggaaaagaaaggaagtccagaggactgcaaaggaaactgtatgcagagcctaacatgcaggccattgttgggtctgccttctttctacttttatgtgtttcagttttgatttatttctattcatgtgtatgggtatgcttgcttttctgtatctgtccacatgtatgcaggtgcccaaaaaggccagaggaaagagtaggatttcctggacctggagtaacaagtagttgtgagcagccttaaggatgtaggcactggaaactgatctctgatcctctgtatgaacaccaagcacactttcttaactgctgagccaactctccagtgtgtgtgtgtgtgtgtgcgtgtgcgtgtgcgtgtgtgtgtgtgtgtgtgtgtgtgtgtgtgtgtgtgtgtgtgtgcttgtgtgtgtgagcacatgtgtgtctgcgtgtgttattgttgttatcttgtttttctgccagttaaacctcataggaatgttgactccttgtgctgaatgatgcataggactagaataaggaggtcattgcacactctgatgctttccctgagttatcagatcttgagttttgtgacattagagagaaataaattaacagttagcagttgtctgtttggttttgtcttccttgtttgtttctgctatgggtttgggttttgtttttgtgacaagatcactgctaagtagctgaggctgaccttaaggtctgctgtctccactcgacaaatgatgggattagcaattaacatcttgcccattttagtgtagcttctccagagttaagagtgctagcaaaagtcaatggatacctcacaaaggggtgaacaatgctaagacttgggagagcttcctttccccacatttttggctccatggtatatgaaacagcaatccatttagtttaagtagggaagagtttcaacgttcatataattgtccttttatgattgaggttgagtctttttcatattttaggagttacacatatatccttttagtgaactatctgttttgccatcacttttgttctgtgagataattagttctgtgcatttaaaggagagctttgctgacggtgagttagattttgctgctgttgttggtataaaacagcaagcttcttagtgtgagcttttgggcttgggactcttctaattattcacattctgtagttgtgaaggggtaggggagttagcttcctgtgtcctttgtgtttctaatctgaaactctgtgtaacaaatgacaaatgagtaagagaaacaaatcagttcaggtcaattagctcatgtgttttcttaagtacataggagaatccagggagtatagactctagacttaatctcaaaggaaacatttaaactacagtcttaaatagcattgttctctgaaacaaagaaaggattgagggaaaggccaggaaggattagatgacaggggcattcatgccttagacaaaggcaggctcctttccacagatctaagacaacctcttctccagttcaccatcctctgcaggggtttcagagaacagtaacttcgtcaaaacaaaattccaaagttggagagatggcttattcagtaagtgctgtgctgaggtttgatcccctacatctaaagccaacacagaggagccagacacagaagcggggatccttgaggtttgctggtcagccactccaactgaattagggagctccaggttcggtgggagtctctgtttgaaaataattatgatgatgatgttgttgatgataatgtggaaaaagatcaaagaagacagctgacagcaacctctggtctccacattcacacatgtataagcacctgcactcaaaggagcacacacacaaacacatacagtggagatatcctctctagatagcaatttctcttaaaaatagttaactccaaatatgactctcatattcaacatgctctagaggtatgttttagactagcatattctgttgtgctttgtgttgtaatgtatcatgaattctagcatgacctacgaactattattttattacagaacgtatcatagtattgaaagacccccgaagaggtacttttgtagagggagacccacacccaggaatcagcgaggccacgaactggatgtaaaaacaagaggctttattggagatgcgggtacccggggcgacttagcttttctgaggccaagcgcgccaagccaagggaaaggggtccttatatagggaaaaaggcgcaagctaggagcagggattctatttgatggttcaaatgaggcacagagccattccagatcagcatattctcaaggtctggtgtctggtacaacagacttgattcctccctccgcgcccaggtggctgaccagacagagaggcagcgggcctttcagtatgtcaaaactgttagtgaatttgctactctaccttgaaaaaaacaagaaatggtatcatcttgttcagctgtttatgccttttgcacattaacattatgtcaggtgttaaaaatgacagcactcaattatctttgaatgaatcattgtttttctattttcctttggattgtaaactggtgctacattgcaattgttctgggagatttgaggtcggagtttggaccctggccacccattctcaataggccaattaaaaagatgagtaatagctaagagcaggaagatgattgattcaatgagatgattgactcagtgtagtcataatgaggagagaaacaaataactgaatccagcgactactgagtttgtcttgggcagtagaatcgagagtcaagcagctctgtccatcatcatcatctcagtgtagtctgacaagttgttggaaatgtgcaaaataactgtctggaagacaagtttctcctctaactggcaccacagtcccaactgttttattcctcagcataagactcctgggaaataccaacttcatggactccattatttaaatgtctgacagccagaggaagaagtatctcttttgaatatcttcgttcctgccagaatggttacaaagcaattccactggtgctagcatatctcacctaaatgacagccatcttgttaacatctcactcttccactggaacttagaattgttgtttaggtacttttttttttttttttatcttgagacaggaggtcaagctcctgaattcaggtcctgacttcttatctctggcacctctttcttccccaaactataatgtggaactttctttaaacttaatgtcctatctgactaaataccaggcgcattccctcatattctccaataacttgtcaccatttccagaaactctaaaatcttccacccgatacagatttggacactgttcatgttctaaacatctggtttttcttccagtcttatatttgccagtctcctgtgcataggcccatgataaattcatatgacttctcctgttagtctgtctaacatgtttttaccagagagtagaggggaaaatttaacttccttatagctccatttcatctatttttcagatattcaaataatgaatactgtagatcagaatatgattgggagagcataaaatgctactcccaaacatgtctttgcaataagttattttgagtgttaagcaaaagcttgaactctatctacctctgaagatttacttttatctctaagtatctcccataaatacatgaggagtagacagtaattaacttctgtttgtccttcacttattaatctatatttaattatgggacatcttggctgagaattctgaaaggatagagatcaaaataattttcatcccataactaacaaacttttttgacagactggtttttattacagtataacttcttaaatttcttcaagaaaaaggatatggatgtatatagtggtggggagtgtgtaagtgaggatatataggtgtgaggaagataaaagtgtgtgggatatgtatgtgtgggaatataggtgtatgggtgtaggggaagtgtacatgaatatatacatacttgtgtgtatctttgtgtatatgggctggagttagaacagctaagctaacataaagcatttaaatgttggtgtctttcttaatctataaaaaaaactaagtgcaaagcatacccttctaaaagataatcaagagttggtgccaacatctatgcctgaaagacacacacacacacacacacacacacacacacacacacacannnnnnnnnnnnnnnnnnnnnnnnnnnnnnnnnnnnnnnnnnnnnnnnnnnnnnnnnnnnnnnnnnnnnnnnnnnnnncacacccccacacacacacacacacacacacacacacacacacacacacgcactaactttgaagtaagaaattgcctctcagtaaatccaacagcagtcagtataacttttgtgtactctttagtttcttttgtatatattcactaaaacatttgtagaatatcttttaaaaggaaaatgtaaacatcaagtatcttagaacattagccaattatgctattacttctaaagtgtttctgctttaaaatgagaacaaagtggtttctctcatagatacagtcataggcaggaggattatggaaacccagtttacatgttcacctataattttcagttttctgtttgcctcaggtcttgcagagaagccaagacggtgtcttgctttgtttggtcttgcagtctctgcctacacacaattacgtaaaagcaatgtgccatgactcacctccttttttaagttactgatgattgcacaaaaagtaaacatttttcctacagtgctctatagcaaccaaatgtgccagggcaaggaccacttttcaagtaaatgaaataaaacatatgggaagaaactaagaactcttgtcaaaattattccactgtgaaattagttacattccacaagaaaatataatcatgccaggggttgctttcttcagtgactctcgcataaactgtagctgggaagaattcctagtgttcagcttcataagctgtcagtgccattggctacctagactcattcatatttgattattttcagtccactgccatttctatacagccctggtggatatttctttggttcattgaataaaacattcgcatcagtctgtgattgtgttgctgttgtccccgctataattaacacagcaacagattttttttaagtgctacttaaagtaactggtgtagagttcacttccaaatagaatacacattaaaaaaaaaaaagaaagattatccaccagagagcttccaaatgtactgcaaactggaagcgtttcagagtcccttaaacacttggctagaagctagctaaaccacctctctcctgtcagcaaagcatgaagctttgagatttgttttagcttccatctagtctctgccagttcaaagaaagacttccaagggacaagttcagagtcccagttttaatggtgttgtctactttctttgtcaaaagtagtacatctccctctgaaagatgtttgagtcccttttaaacatgacagtctaaaggacactctgagaagatttcccaactttcattctcagttttcttcttcatgcagcccttctcacattcctagagctgtgatggcaccatgagaagataaaacaataccccctatatttttcttataacaatatgctatgggaaacacccttatggacatgtgtatgtacacagtagtaaaagaggagaacaggtgtgtgtggggttgggggtgaatgcagacagtaaacctctgtactgaaaaaaaaaaaaactctgtcaaatattcatttctaatcaaatcaaatgtgattttcgcagcttgtcaaatacctatacaagatgaggctagactttcaaatctatgttttaccagtttcctatatgtgtctcatattcctagtaaacaaaattgctcagtgttcctgccacccccagactccccaaccctccccgtgccttcctgccctgtgctctcattcccgggatttgcagagaattgagccctgctagcccggataggcaacaagagaaaagaaacagataagtgtccctctaatcgaaccttatcaatgggtggcagggtagaactgagggaagaatctgcacacctctttcatcactgaagagaaaaattatgccaagattctatgtggacagagcacttcagcgagtgtcttaagaattccataatgcaacctgaggagacagtcgtgtattgattagcaggatctgagcacccctctgagagtgtgcagacaggagaagtgaaatgacttctggtaggcaagaatgaaaccaaagacaagaagggaccagaagacaaccatgtgcttacacccacaaaacattgtctgcatggagtgccttcatcttccaggtccaattctattagttcctcaagaaccccctagtaacaattcttcctagaaatctttacctatcacatcaaaagagtccagactttcctcttccacaagcaacccaacagttctagaacttcttgatggctttccttaatacattgtgggttacagtcatttgtcccaggccttcactgtggcacttttaatacattttgtggatgtgctatcttaatattattgcaactacatattatggcatataactgccactcgacaaatatggctactatgattttgacatctgggaagagcaaatatttccatactctgttgatcaggcaaaaaaggtgccaagatccaaatatatcccttggatgctctcccagttagccaatattgttagacattctccaatatgttccatagagataactcgatttgtttggcttatattgaatattcacttgcaattcaccaatgacctggtcaatgaatatgataatttatagtgacaaaattattcactaccatctcaaggcataaaaggaatgttggatacacaatatcataaaacaacaacaacaaaattcacttccattttctcttcaagtgttcttggcacaaccaggagaccatattattccaaaaaaaattattgactccaaggttaattgactttctagttagattaaaatatagcttatttccatagttgatttagcaatcttttcttgctatcttagccatgaattaaatgcaccattttggaagtatatattagaatatgtaagcaatctaatttcatggtggaatacacaggaaaaatcttcaatattagaagtaaaatatttcttcaatgttctctttgttaactactaagaaaactaaggttaagttttcagccaatctattagacactgtgaaatacattttatgatttaatattaagtttgactatttttttctggttaatttccatttctccaatttcttaaagattggtattctataagcttatataaatacctaaatggcatacatttaatgaatataaatataaaactataaaataacactaataaacacaaaactcaagcgatctgttcttatttatacctcaatatcctaaagtcaaatagtttgcattgaaatataatacaatccaaagaggaaataaatgactgcttttgcctcttgaaagtaaaatgatttcaaaactaaatgaggactcaagaaaactctgtattggtagatcccttgttttattctttaacgtcaaggcatgtcatttacttttacctctcattttgttttctaaaaggtgtagtaaataaaactttcatctcaccatccacctcatttggcaattctctaataaagtaaaaaggtgaggaaacctggttttcaaatacctgttaatatttacagagcgataagagtacaagaatccaaagagctcctgttcattaaggatgctactctccaaggccaaaggaatgcatcaaggaaataaaccacaaatatgattcacagtggaccactcaatgctcaacagactctccttgaaaccccactttaaaatgcataattctttcattaaaatatgttgaaaagtcagagtttgaagctccaaattattgtaaaatcttaacctattttctttttgtcagtatgagatatattcatataaattatttagggttttttttgcgggggtggggtgggcattgagacagagtttctctgtgtagccctgactatcctggaactcactttgtaggtcaggcaggtctcaaactcacagagactggacttcctctgcttcacaagtgctagcattaaaatagtgcactatcaccacctggctaattatttagtatttattggcatattttcatttctaattagaatgtaccaaaattagcattgtactgcaaatgagaagtaataatcttacactaaataagaagtgctggaacatgaagtccctcctctttttaatgtgcagatctttccatgaagctgtttatgaaatgaagttagccagtgctactcctgactcaaatgaagcatttgctgtaggggaagctgtagccacgcctacttaggggctggctacaggtgtgcctgaccatgcttgcgagggcgtggtcagggtgatgtagaatgactgcgttttctctttcaggttcactttggtacttgctggacagactgctgctaatcgttcccaatctgtgggtgtcaccctgttaaaggttgcccatgaatgtaatagctgttttacgtatgggctatggagaccatatgagacaactgattaatattcttaagatccttcagctgtataggttgccattcataagccatccatccatgagtgtgtttcttagaagctggcttttctaccatggtagctgggtacactaatggtgtacgagtaacaaccttagaagaatagtcacaatacctgggtggagtaggtgcctgggattggtgtgattctgcttctgaggcatcccaatgatctttaagcctagtaatgatatccttttgaaaagtttcaatctccttaatcataaaagattccaagcatgttagtgaatctgtaaattgctctaactgctcatttacatgtttttctaggtctttaatatgatcatccttaggcagcatctggatggcatggaaactgccttctatgtattcgagtctagattcgaggtcatgatttgctgattttgaatcctcagcagtcgaccgtatggacctatgtaatctgtcagccctgtactgtaaattatcttccaaacattcaaatctagactcaaatttgtgatctgctaccttggatgcttcaataattgattgaatggcattgtccaattcttcaaccctatcctgggtattttgcaccgttgcatctagttgctgggtaacattgcctatctgagtttctatctggctacatatattctctagctcctcgtggtcttctgacagcctagcctctaaggcctcagacatggaggatctctctgtgtttatcttatcatcaatatactgcatctcatcttgggtaacagacagctctgtctttagcatattagacacatagccaagcttatcatccaatttctgttccacttgctccacagttatggtctgacctaatctgttctccaaaacatcattgcgtaaagatgttatttcctgtaagtagattgtgaggttatccttatccctattcctgagtcctctggctagtaatattatttgtaccagcaagctaactgccattatggcatataggccagtaattggcaaattagcatcctcctcaaacattgaattcacgtaataagcaaaaatattaccaattttagtaaatgataaatattccaccataattttacctgatttctattccagatgcagtaactatctttgacgttcagttagtctgcggcgtttggcagcagtcggtcagtggtggagagaggtcacaaaagcggctgtgcttatcttagagagtatacggccttgcggcagcaaccactgaaatagatgtggctttactggagcagcagtggccaggggaagcctctgctgaaagccgaggcctaccccaactctaggcagctagaaactgtctccgagctgggtggatggttctgannnnnnnnnnnnnnnnnnnnnnnnnnnnnnnnnnnnnnnnnnnnnnnnnnnnnnnnnnnnnnnnnnnnnnnnnnnnnnnnnnnnnnnnnnnnnnnnnnnnnnnnnnnnnnnnnnnnnnnnnnnnnnnnnnnnnnnnnnnnnnnnnnnnnnnnnnnnnnnnnnnnnnnnnnnnnnnnnnnnnnnnnnnnnnnnnnnnnnnnnnnnnnnnnnnnnnnnnnnnnnccggcatggcagcagtctgtccagcaagtaccaaagggaaaccgaaagagaaaatgcaggcactccacatcaccctgaccacgccctcgcaagcatggtcaggcacacctatagccagcccctaagtaggcgtggctacagcttcccctacaatttgctgtagaaacagagggcattggagtgattccagaagtgaggaaagtgtctcatgtgagactcacctcataagttatcaccattctgctctgttgcctagctggatcaggaagaggtggacagtctactaacatagaacatacagggcacagttatccaccaagggcgtcatatcccttcatggctggatgcaatgactcttggcatagaaacttctttaataaaccagttactgatgctgagtccatcactaaacttgaacaaatatggcaagtagtgctttcagtcatctggtggtaactatcacgagccagtctcttacaacaataactgggcacctgcagagtctgatttccgtaaagtagcctttttacttcagcacaaaaagcccattgccttccttgcgtttttatggagtcttttggcattttcctgctcaattagaattgtgaacaatgtgaaagcagaaaatggagatatcagtgaagagacacagtgttgaaaacaaacttcagagtcaactttttactcaatttctctctctcttaatatttatttatttccatttatgtgtatgagtattttgcatttatgtatacatgcacatccatcatgtatgtgtcttttgcccccagaggtaaaaagagaacatcagatcccttggaaggagagtttcagatggttgtgagccaccatgtggatactaggaacctaatctgggtcctttgcaagaggtatcactccaaccttctggttcttttgttttgtcttttgttgtttggttttcaagagtttctcttagctttggagcctatcctgtcactcactatgtagacaagaacaactcatatgtagacaaggcctcaaagtcacagagcgctgcctgcctctgctctctgggtgctgggataaaaggcgtgtaccgccaatgcccagctcattgtgtatttttaattaaaggttataatgtcatctgttctcacagtaaggacagaaaagatatttccaaatagcaaggttagaacttgtcacatggcggaaataattatgatggttgtaaaaaaatacatattgaagaaaggaactcatccattcctgtgggtctatttccaactgcaaatgtattcttcaaactatttgcatcctaggagtttgaagagatgtgttttcgtttcagttctatgataaccctggttgtgcactggatttgaaaacacaatagatcacacagtgagggtggacagtgccgatgtcctcacattctggtttttgttttgttttattttgtttttttgttttttatttaagttctctttgattactaaacattaagcatagttatatacaccatgtcaatatttggtcaatgacagacctcaaatgttatggtattcccatagtattataatccccaacattcaatggcattgtggacatggcagcaggtgttgcaacacattctttgagtccttagtgatgcagaagtaaactacccacccactggaatatgtatagaaacacagtagtacaattacatataacaatgactcatgacaataacaaataattgcgcttatgggttttgcattttctatatattgtttatcatcatttcagagtgtactgtttcttcaaaaaagttaactataaaatagccttagcttttgtgtattcatgaatacaacaagaagtcatgtcagaaaatagcaaataaagctatctatgtctctaatgaccttctttcagtcttctaaaaaatgtttattcagccactagtagtacatgcagcactgtggtagattttatcataaaaatatcaaaagaatttgacacatgtgtttgaggatctcagggttttcctaaaaccaatagttaaatcaatatatcagataaaaggctgtaagtacatgagaagcgatgaatgtgtttgaggaagtgtgtagtagaagggccaccaagcaggagaaacagaagacaatttgtggaataggacatcctgggaaaggaatcttaaaatagttgttgcatccccatcttggtatatatccaaaggaatcacaattcatacatacaaaatatctacacccttgtgtgatttcattcacaatagctaagatatggaagttgtcaaagtgaccacaggtagataagcagacttagcaatgtgcttagtgcgctcagtggaacccggtatactctattcactcataaaggagaaatggaatcatatgtaacaccataaatacacctggagaattttgttcaaagggaaataagtaaagggagaaggcagataccaggagatcccacttaagcagaaatctataattttgattgcaaggatatagagtagaaggttaacagaggctgggcattagagtggggtagagaaagtggaaatttgaccaaacagcataaaatctaacccactctctaagaataagcattagtcgtctatagtacataattgacacaatgtggtatacatttcagagtgatagaagagtagagctttagcattcaccaataatttattaaataaaaagtgatgggctgttcaggtggttaagtgtgttatttggtctttatgcacttttttaaaataaaacatacacataaagcattttcttatagctcagaaacatatgcaaatgctatttattgacttaaaaacaaattttcaaaactgtgattatgtgaattaatgtataagtttatatatgaattaacctgtggaatacagtgaatactgtctttcctcaccaagagaaggcacaatagcatttagggtccctatatcttccttgtactctttcactggtttgcaggctttatttcacaacctgtgagttggttgatcagcatcctagtcatcatgggttgatgttatcctgtccttctatttctttataataaatgtcagaatctctgtaaatattctttcttgtgggttatatttccatatcgttttatcacacctgaatctgacccagggcatttgtaagttcagtgaaatggatgctttcaagaggacagaagaatcacatatggttcaaccaacttggcttcttttattctccatgacagctggtagaaaggaacatggaaaaaatctgtgtagcacagacccagaaggaagacctcacgaagtccctcaaatcaccaagatggtggcctgcttcttttgcatgagggaaggcatggcattcttcctgctttctcttcctgaacttgtcctttcaggaaagcagccaaaaccttagcaccagcctacactgaagttataaccctgaacttgtcaatcttctctccctagacagaacctaggaacctgagtcactgaatgaaataaggatgtgtacaagcccaggtgcagtgcatcctgaggtcacttctgctgtgggatttttagcaatcggattcaggagatacctgggtttcaatgtggccatttatgtgcagcccgcattcatcaccttctccttctcagctagctctctcttcaataactgcaacctacaaatcaatgctatatgtaaaccattgcttacattttcatttgcttaaacacaccttgtttccaatccttctcctgtctaagaaacagggtggtaaaatggccacctacctactagaccacaagctctgccttcttcagtagctcactaaaagtctggccgtaactcactcccactatcttctttcaggaacaggaacatcccaccactttgaaagaaggcaattttcctgtaatttcaaatgtatgaaaagaaaaatttttcttgcagcattggcagtaaactgtacaaacaataaattgttctgaagattgattatgctcccaagtgttcccatgaccattaatcaacggcatcagcagcttactacatacattacctgtcataagcaagtaagaacaaaaacagaaccaacaaacatggctaaatttgcttgtaattcaggcagtcttaggaattccctgaaaatggaaagcaaagcaggccctatctgatagaacagaaacctgagcatttcccatttttattaaggcaccagcagagtttgattttaaattgtgaattttatatagactttggctcataatgtgatccaattttaaaagttttgctatcattctccactattgctatgcatctttgagaaaaattactttatttctctatttttctacaccatatttctggttacaagaataaatataagccgaatgtttaatatcatctctttagcaagcatttcgatcattacaaagttgatgtgagggtagctgaatacctaagaaaacaaaatatttcagtgaagtcaaataaagctgctgtctctctatgatcagaggctgtcactgctctctgctgccagccctcatgggttctgggactttatagagagaagttcagtaacaatgagtattcctttattataaggatgaagtgaggtgtattttgccatgttcctctcatagcatagtctctggggaggctagaagctatccagtttctagggaggattctgtgaaaactggacttgttaaaataaatgtcaataaggctatttgtaagatcaaaatgctttaaagtgtgaaacctgttcaatggctgaagtaaaaaatgcctcttaagaaggaatgaagtacagcaaaagaaacattggctaattcctttttctaggaaacctagttggttcaggttttcttctgataaataaatgaacatgaaaagtagtttttaaaattatcctttagtcttaacttctacaatatagtagacaaatacagcaaggctgccaatctatacatccattcttcaccagaaaaaaatgccacagtctcaaaccctgccttctggggggctgggtgggtgagagatctttatcctgtcaacaagatagaattccaggagaaagaaagatatttctgggcagttctacctctaagaccactcctaaaactgttccagaagaaggtagagagaatggctagcaggtaactgcccagggtccaccagagattttcaaatccagtctttgtctcctaggaaaacttaccttaaaacacagaaagcaacagaaaactgcaaagtaagaatgagaggaagacttgactacaatacaagaatgcatatgaaatagttaaggataaaaataagctatattttgaccacccaaaagttaaataacagtgaaaatgtgcttactactgcagcgagggaagatgtgaccaggaatccccctgaaagtcatgctgtaaccactgtcctgcttcctggttcacttcaaaatggcattgcccctgcaaatgctcacatgcaaacacttatattcaaacaattgtcaacaatcatctgaactctttttcattcccccttacctttgtaaatcacatttatttcataacgttagactcaaaccagatgaaatcccctgacaaaagaatcgaacaagtccaaattgatctcttaagtggatcaatagaaacttaaccgaaatggattggggattttatcaaacttgatgtagtagaacactaataaaatcacttccaattcacacatatggagttaaattctcagcacaaattgatctgattaccaaggatgaatggtcacctttaataatggattaaggtagtaaagaattctttctctgcacacaaacgtgttccccttttaaactcatgaagacagctttcacttttctacttccacaaaactttattcatatcttaagtgttcagatctgaatttagaactgtctcaatttgtaaaatttgactctacttggaagtgttttcaagagagaactttggagacgctaaagaagccatgagacttgtattgtcttaggaaaccatggtatccctagaagttacttgtaagataatataaataataagaaacatgttaatatagcagaagccttcttgttggaaatgcttgctttgcctattttatattgactagtttgataatttatgtttatgcttttgaatatattatatattctaacttactaatattccctaaaggaatttatgcattaaaaattcgtgaccatcatgacactattttggagtaaagatttaatgtggtgatgaattaaggttcaagatagcatttctccaagaaagaaaacctctatctgtttcctccccatttgaaatattaaaagtctccatttcttcaacattcaacagcagtatcaagtgttggctctagaatatacaaggaagcttcacttctccaatggagggcaagggtattaccacagaatgctcagattctgaaatatcttgtcaaccctgggccagtgaatgcacttgaatgcaaaccattaaccaccccccccacacacacacacatcattctctgtgctatcattgctctttggtctttgacacactctctaaatcttacttcagttaggaaaataggccccaaagttgtaagcttctctgtccaagaaaacatatgaaataaacagtcaaggttgagcatatgtctgtgtttcccaagaaaacaaggtcctctaaatcaacagggaatgatgcacatatgaactcacagagactgaggcaggacatgcaggcaggcaagtatcttcaacaggtggggttctagaactgaaaggagatgtgcacccatgcctccatcctgaacacaaaagcaatctctaatggataactacttgcaaatataagtttaggtttttccaagggagtctcatggggaaagaatctactcttaagggtaggcttcatgcccagcaatagataactacagaaaatgaactcaagaacacctttggcagttccttgtttcataatactgtgtcagggcttttaaaaaatcttattttttattttatttatatatattttcctcttttttatactacaggtcctttttcatatgtattatggcttccagattagtgattttcagtccaaaaatatatgtagtgtttccaaatagtccccattcttcagctgaaagtaatttaggaattcttcactatagtgtggtctttagaaacatctacagtacttctgttagtatttaggcatttttactggcttgcctttggagtgatctatgtttcttctctctgcagtgacaaagttccagaggtaatggccacatcactctgaggaaatactgtagggactagccatggagaatagccagaactaattactgagaacattcacaagagagaaacttttgttatcataagtcaatatgattttagggccattcacctttaatgtggcaaaacctattcaggcaaatctacccttgccacagctttcaccaactgatggaccatgtaacatatgatgacaacaagaagtgcctgctagagctgtaagatccacactatgaaagagagttaagagaagtagttttctatgtgaggttgaaaagagaatatcaggaagctataagcaaacattgggtctttttttttttcttatctggttcatgttttaaacattttgtaaattgttattttaataactttattttttatttattattgcttattattacaccattggcaattaatttatctctatcaatgaaactgtaaaacttttcttcactttgataaccaggtttttaatgtatcatcttagaagtttagttggttataaattttatagtttttaaagcaactttttgtaccaccctttgaattagcttgaagcttgattattttctgttgctatccttccatatttactatggtacactgcacagagctaacagtaattgtactagtcaactgcaagtgtctcacacatatattttctctgactcttaaggaagtaattgacagatagaagatagaataatttctgaatgtcaattgcattaatgtttacattctatctgtaagaaacctaagtctagattcctccaccgccgactgacctggaactaggtgagtgagttcctgcctgctccccacccaggccagaacaccccgaccaccccatccccccaccnnnnnnnnnnnnnnnnnnnnnnnnnnnnnnnnnnnnnnnnnnnnnnnnnnnnnnnnnnnnnnnnnnnnnnnnnnnnnnnnnnnnnnnnnnnnnnnnnnnnnnnnnnnnnnnnnnnnnnnnnnnnnnnnnnnnnnnnnnnnnnnnnnnnnnnnnnnnnnnnnnnnnnnnnnnnnnnnnnnnnnnnnnnnccaccccatccccccacccccgcctgtgcctgcgggcttgggccagacacgcccaggcagggaggagctccctgcgccccaaatctgctaacaccccactcttccattccacagaacgaccgaggaactaggaactagtgaggagaccaccaggagcgtctagatcatctagagttgtggacattgaattcctagcccccacacaccactgggccacaagaggagatagagagaacccaccnnnnnnnnnnnnnnnnnnnnnnnnnnnnnnnnnnnnnnnnnnnnnnnnnnnnnnnnnnnnnnnnnnnnnnnnnnnnnnnnnnnnnnnnnnnnnnnnnnnnnnnnnnnnnnnnnnnnnnnnnnnnnnnnnnnnnnnnnnnnnnnnnnnnnnnnnnnnnnnnnnnnnnnnnnnnnnnnnnnnnnnnnnnnnnnnnnnnnnnnnnnnnnnnnnnnnnnnnnnnnnnnnnnnnnnnnnnnnnnnnnnnnnnnnnnnnnnnnnnnnnnnnnnnnnnnnnnnnnnnnnnnnnnnnnnnnnnnnnnnnnnnnnnnnnnnnnnnnnnnnnnnnnnnnnnnnnnnnnnnnnnnnnnnnnnnnnnnnnnnnnnnnnnnnnnnnnnnnnnnnnnnnnnnnnnnnnnnnnnnnnnnnnnnnnnnnnnnnnnnnnnnnnnnnnnnnnnnnnnnnnnnnnnnnnnnnnnnnnnnnnnnnnnnnnnnnnnnnnnnnnnnnnnnnnnnnnnnnnnnnnnnnnnnnnnnnnnnnnnnnnnnnnnnnnnnnnnnnnnnnnnnnnnnnnnnnnnnnnnnnnnnnnnnnnnnnnnnnnnnnnnnnnnnnnnnncaccgtaaaaaggccaaacctaagaataataggtgtagaagaaggtgaagatcccctttgacctacaaggatgactcgatctgacagtccgggcagtggaggagaggatggcctagaagcccctcccctagaatgagagtgatgactactctctatgctatactagagtcctcatccagtggctgatggaagcagagacagacatacacagaaatacactgagctgaattctggaacctagttgaagagagggagggatgaagaatgtatagatatgtacccccattttttnnnnnnnnnnnnnnnnnnnnnnnnnnnnnnnnnnnnnnnnnnnnnnnnnnnnnnnnnnnnnnnnnnnnnnnnnnnnnnnnnnnnnnnnnnnnnnnnnnnnnnnnnnnnnnnnnnnnnnnnnnnnnnnnnnnnnnnnnnnnnnnnnnnnnnnnnnnnnnnnnnnnnnnnnnnnnnnnnnnnnnnnnnnnnnnnnnnnnnnnnnnnnnnnnnnnnnnnnnnnnnnnnnnnnnnnnnnnnnnnnnnnnnnnnnnnnnnnnnnnnnnnnnnnnnnnnnnnnnnnnnnnnnnnnnnnnnnnnnnnnnnnnnnnnnnnnnnnnnnnnnnnnnnnnnnnnnnnnnnnnnnnnnnnnnnnnnnnnnnnnnnnnnnnnnnnnnnnnnnnnnnnnnnnnnnnnnnnnnnnnnnnnnnnnnnnnnnnnnnnnnnnnnnnnnnnnnnnnnnnnnnnnnnnnnnnnnnnnnnnnnnnnnnnnnnnnnnnnnnnnnnnnnnnnnnnnnnnnnnnnnnnnnnnnnnnnnnnnnnnnnnnnnnnnnnnnnnnnnnnnnnnnnnnnnnnnnnnnnnnnnnnnnnnnnnnnnnnnnnnnnnnnnnnnnnnnnnnnnnnnnnnnnnnnnnnnnnnnnnnnnnnnnnnnnnnnnnnnnnnnnnnnnnnnnnnnnnnnnnnnnnnnnnnnnnnnnnnnnnnnnnnnnnnnnnnnnnnnnnnnnnnnnnnnnnnnnnnnnnnnnnnnnnnnnnnnnnnnnnnnnnnnnnnnnnnnnnnnnnnnnnnnnnnnnnnnnnnnnnnnnnnnnnnnnnnnnnnnnnnnnnnnnnnnnnnnnnnnnnnnnnnnnnnnnnnnnnnnnnnnnnnnnnnnnnnnnnnnnnnnnnnnnnnnnnnnnnnnnnnnnnnnnnnnnnnnnnnnnnnnnnnnnnnnnnnnnnnnnnnnnnnnnnnnnnnnnnnnnnnnnnnnnnnnnnnnnnnnnnnnnnnnnnnnnnnnnnnnnnnnnnnnnnnnnnnnnnnnnnnnnnnnnnnnnnnnnnnnnnnnnnnnnnnnnnnnnnnnnnnnnnnnnnnnnnnnnnnnnnnnnnnnnnnnnnnnnnnnnnnnnnnnnnnnnnnnnnnnnnnnnnnnnnnnnnnnnnnnnnnnnnnnnnnnnnnnnnnnnnnnnnnnnnnnnnnnnnnnnnnnnnnnnnnnnnnnnnnnnnnnnnnnnnnnnnnnnnnnnnnnnnnnnnnnnnnnnnnnnnnnnnnnnnnnnnnnnnnnnnnnnnnnnnnnnnnnnnnnnnnnnnnnnnnnnnnnnnnnnnnnnnnnnnnnnnnnnnnnnnnnnnnnnnnnnnnnnnnnnnnnnnnnnnnnnnnnnnnnnnnnnnnnnnnnnnnnnnnnnnnnnnnnnnnnnnnnnnnnnnnnnnnnnnnnnnnnnnnnnnnnnnnnnnnnnnnnnnnnnnnnnnnnnnnnnnnnnnnnnnnnnnnnnnnnnnnnnnnnnnnnnnnnnnnnnnnnnnnnnnnnnnnnnnnnnnnnnnnnnnnnnnnnnnnnnnnnnnnnnnnnnnnnnnnnnnnnnnnnnnnnnnnnnnnnnnnnnnnnnnnnnnnnnnnnnnnnnnnnnnnnnnnnnnnnnnnnnnnnnnnnnnnnnnnnnnnnnnnnnnnnnnnnnnnnnnnnnnnnnnnnnnnnnnnnnnnnnnnnnnnnnnnnnnnnnnnnnnnnnnnnnnnnnnnnnnnnnnnnnnnnnnnnnnnnnnnnnnnnnnnnnnnnnnnnnnnnnnnnnnnnnnnnnnnnnnnnnnnnnnnnnnnnnnnnnnnnnnnnnnnnnnnnnnnnnnnnnnnnnnnnnnnnnnnnnnnnnnnnnnnnnnnnnnnnnnnnnnnnnnnnnnnnnnnnnnnnnnnnnnnnnnnnnnnnnnnnnnnnnnnnnnnnnnnnnnnnnnnnnnnnnnnnnnnnnnnnnnnnnnnnnnnnnnnnnnnnnnnnnnnnnnnnnnnnnnnnnnnnnnnnnnnnnnnnnnnnnnnnnnnnnnnnnnnnnnnnnnnnnnnnnnnnnnnnnnnnnnnnnnnnnnnnnnnnnnnnnnnnnnnnnnnnnnnnnnnnnnnnnnnnnnnnnnnnnnnnnnnnnnnnnnnnnnnnnnnnnnnnnnnnnnnnnnnnnnnnnnnnnnnnnnnnnnnnnnnnnnnnnnnnnnnnnnnnnnnnnnnnnnnnnnnnnnnnnnnnnnnnnnnnnnnnnnnnnnnnnnnnnnnnnnnnnnnnnnnnnnnnnnnnnnnnnnnnnnnnnnnnnnnnnnnnnnnnnnnnnnnnnnnnnnnnnnnnnnnnnnnnnnnnnnnnnnnnnnnnnnnnnnnnnnnnnnnnnnnnnnnnnnnnnnnnnnnnnnnnnnnnnnnnnnnnnnnnnnnnnnnnnnnnnnnnnnnnnnnnnnnnnnnnnnnnnnnnnnnnnnnnnnnnnnnnnnnnnnnnnnnnnnnnnnnnnnnnnnnnnnnnnnnnnnnnnnnnnnnnnnnnnnnnnnnnnnnnnnnnnnnnnnnnnnnnnnnnnnnnnnnnnnnnnnnnnnnnnnnnnnnnnnnnnnnnnnnnnnnnnnnnnnnnnnnnnnnnnnnnnnnnnnnnnnnnnnnnnnnnnnnnnnnnnnnnnnnnnnnnnnnnnnnnnnnnnnnnnnnnnnnnnnnnnnnnnnnnnnnnnnnnnnnnnnnnnnnnnnnnnnnnnnnnnnnnnnnnnnnnnnnnnnnnnnnnnnnnnnnnnnnnnnnnnnnnnnnnnnnnnnnnnnnnnnnnnnnnnnnnnnnnnnnnnnnnnnnnnnnnnnnnnnnnnnnnnnnnnnnnnnnnnnnnnnnnnnnnnnnnnnnnnnnnnnnnnnnnnnnnnnnnnnnnnnnnnnnnnnnnnnnnnnnnnnnnnnnnnnnnnnnnnnnnnnnnnnnnnnnnnnnnnnnnnnnnnnnnnnnnnnnnnnnnnnnnnnnnnnnnnnnnnnnnnnnnnnnnnnnnnnnnnnnnnnnnnnnnnnnnnnnnnnnnnnnnnnnnnnnnnnnnnnnnnnnnnnnnnnnnnnnnnnnnnnnnnnnnnnnnnnnnnnnnnnnnnnnnnnnnnnnnnnnnnnnnnnnnnnnnnnnnnnnnnnnnnnnnnnnnnnnnnnnnnnnnnnnnnnnnnnnnnnnnnnnnnnnnnnnnnnnnnnnnnnnnnnnnnnnnnnnnnnnnnnnnnnnnnnnnnnnnnnnnnnnnnnnnnncacagtttttcacagacattgaaagaacaatactcaactttatatggaaaaacaaaaagcccaggatagccaaaacaactctttacaataaaggatcttctggaggcatcaccatccctgaatcgaattgaaaaccctgacattgacccacgcacctatggataccttatctttgacaaaggtgctaaatctatacaatggaaaaaagatnnnnnnnnnnnnnnnnnnnnnnnnnnnnnnnnnnnnnnnnnnnnnnnnnnnnnnnnnnnnnnnnnnnnnnnnnnnnnnnnnnnnnnnnnnnnnnnnnnnnnnnnnnnnnnnnnnnnnnnnnnnnnnnnnnnnnnnnnnnnnnnnnnnnnnnnnnnnnnnnnnnnnnnnnnnnnnnnnnnnnnnnnnnnnnnnnnnnnnnnnnnnnnnnnnnnnnnnnnnnnnnnnnnnnnnnnnnnnnnnnnnnnnnnnnnnnnnnnnnnnnnnnnnnnnnnnnnnnnnnnnnnnnnnnnnnnnnnnnnnnnnnnnnnnnnnnnnnnnnnnnnnnnnnnnnnnnnnnnnnnnnnnnnnnnnnnnnnnnnnnnnnnnnnnnnnnnnnnnnnnnnnnnnnnnnnnnnnnnnnnnnnnnnnnnnnnnnnnnnnnnnnnnnnnnnnnnnnnnnnnnnnnnnnnnnnnnnnnnnnnnnnnnnnnnnnnnnnnnnnnnnnnnnnnnnnnnnnnnnnnnnnnnnnnnnnnnnnnnnnnnnnnnnnnnnnnnnnnnnnnnnnnnnnnnnnnnnnnnnnnnnnnnnnnnnnnnnnnnnnnnnnnnnnnnnnnnnnnnnnnnnnnnnnnnnnnnnnnnnnnnnnnnnnnnnnnnnnnnnnnnnnnnnnnnnnnnnnnnnnnnnnnnnnnnnnnnnnnnnnnnnnnnnnnnnnnnnnnnnnnnnnnnnnnnnnnnnnnnnnnnnnnnnnnnnnnnnnnnnnnnnnnnnnnnnnnnnnnnnnnnnnnnnnnnnnnnnnnnnnnnnnnnnnnnnnnnnnnnnnnnnnnnnnnnnnnnnnnnnnnnnnnnnnnnnnnnnnnnnnnnnnnnnnnnnnnnnnnnnnnnnnnnnnnnnnnnnnnnnnnnnnnnnnnnnnnnnnnnnnnnnnnnnnnnnnnnnnnnnnnnnnnnnnnnnnnnnnnnnnnnnnnnnnnnnnnnnnnnnnnnnnnnnnnnnnnnnnnnnnnnnnnnnnnnnnnnnnnnnnnnnnnnnnnnnnnnnnnnnnnnnnnnnnnnnnnnnnnnnnnnnnnnnnnnnnnnnnnnnnnnnnnnnnnnnnnnnnnnnnnnnnnnnnnnnnnnnnnnnnnnnnnnnnnnnnnnnnnnnnnnnnnnnnnnnnnnnnnnnnnnnnnnnnnnnnnnnnnnnnnnnnnnnnnnnnnnnnnnnnnnnnnnnnnnnnnnnnnnnnnnnnnnnnnnnnnnnnnnnnnnnnnnnnnnnnnnnnnnnnnnnnnnnnnnnnnnnnnnnnnnnnnnnnnnnnnnnnnnnnnnnnnnnnnnnnnnnnnnnnnnnnnnnnnnnnnnnnnnnnnnnnnnnnnnnnnnnnnnnnnnnnnnnnnnnnnnnnnnnnnnnnnnnnnnnnnnnnnnnnnnnnnnnnnnnnnnnnnnnnnnnnnnnnnnnnnnnnnnnnnnnnnnnnnnnnnnnnnnnnnnnnnnnnnnnnnnnnnnnnnnnnnnnnnnnnnnnnnnnnnnnnnnnnnnnnnnnnnnnnnnnnnnnnnnnnnnnnnnnnnnnnnnnnnnnnnnnnnnnnnnnnnnnnnnnnnnnnnnnnnnnnnnnnnnnnnnnnnnnnnnnnnnnnnnnnnnnnntggaaacagagacagacatccacagatatacaatgagccgaaatcgggaatttagttgaagagagggaggaatgaagaatgaaggggtctgtcaaggtggagaaacccgcaggaatagttgacctgaacaagggagagcacatcgataaaaaaaaaaaagaaaaaagaaacctaagtctaatgtgtcaaatttcatttgacatagaaggccaggctttcttcagtgttcattaagagacaatgaaagaaaatgtcaagaaccaatgttttaatatatccaaattaattttttccttccatatccaagaaataaaactcctaagtgcaatgcaattttacaagtcaaaattatgacttattgtcttagtcattatcttattggtgggaagagaaaacttgatgatggcaactattaaaagagaatgtttttttttttttttttgatttggggcttgcttacagtttcagaggcttagtcaattaccattaaggcaggaagcacggtggcaggcatggcaggcagggtattagagtagttgagaactacacactgatgggcaggcttgaagagctggagcctggcatggacttttgaaatctcaaatcccaccacaaaatgatatatttcctccaaggctatatctcttccaacaaggccacacctcctaatctttctagtcttatcaaagatatccactctctggtgactaacataggagtctatggggactgttctcaaagcaccacactgacctaattgtgaaaaatactagggatcaaagaaaaacaaaacacccataattcatgtatagatgataaattttcatgcatatatctagatgattgtgaaaatgggtaaagggagaaatattaacatcactcaagtgatgcagtataactaaattccaaatttacaaacggtcatataaggataaagtcatataaggataaaggagagtagtggagcaaatagccaaatttctggcttgtgcaatgagacaaatactagtatgagagaaagaacaagtagagagacttgaatttaaaggccagagtctcatataaaggtggaagtcagaagaaaaatcagatgtgggaattgatatgtatatatttgtttgtgtgtctgtaagtgcagggataatgtcatacacttaccaagccagttggtgcggtgctaataccatttattaacttgttccattctgtgatttaaatttccaagggaagagaaaaccagaggagaaatggaaatgttttaccgagacactgaagtagtgaaaatgaatgcttacacaataacatgctttaactcatttggaggaagtgctggccattaaatatagtcaaaacagacactgtgctgtgaattacaaggtcgtaaacatccctttaactggtatttgacttgttagagtgtaatggtgggtggagagaagtatcacaataaatactagaagacaaattctaggcctgtcagtgaggatttcttatgtgttattttcacttaaacatggaaggaaatgacaaatccttaagtagagtgaaagccaacttaatgaagtccttatacaggccagaaatactgaatctgacccattgtccagacagaacaaatttaagtcaaatctcagcccttgtgcttctgggctaaaagtcttagtcaaatatccttccagcattgtatttgttgggcatattagaatggtcagaatcttcctgtcataagtgttttatatttttctcaatgccatggttgtctgcaaagtcctgtaaaatttattgggtttgctccatgaagatgtgctgaggattaatgctggagttttgagtacagcaataaatctaaagcaaataaatactatgaacttctgaaggttaagaggccttcagacaggctgacccacctttcagcttctaaagatgaagcaatgagaattggggttgatccaaacttaccctgtcatcataaaatcaaaacatgtcaaagatggtcttctcatattcatttctaaaaagcaaatgtctgtgaatgaacatgctttaagaaattctgtaggtaatacattttaccatttaattacatttctgttttatttcagataccttatcataaactagtagcccaaaaattcaagttcatcttccctgtatatcttagggaagtagctatatgacttgagttgcaaatcctaaaaaactagaaaaaatgccaatgctattccaccattgatgtaattccaaagacttactgtctctcagtgtcatcaatacttacagatccatccaaaaagaaaattgtttctttaataggaaatgaacacatctctgccctatctctatttcagtaatgctgttgaatatgtatataaacataaatgtaatattttggcaggatgtccagctttctcccattttttacattctctatctctgtctattccacccttctcctttccctcattattccttctctttcaagaccaatcaaattgctttcttaatttcaaatctgacatgtctgctgtatttcactagaatgctcaaactggaaataaagtcttctttctagttgatagcaccaagttcaagctctaatctctagggcaggagttttcaatgggaccttctgagatgaacagtgatttatattcctctcaaacacacaacagacacaaggcatttgaaatgtgggctagtgcaagtgaagcactgaatttgtaacaaattaaatttaaatcattccatgtggttaatggcccttatttaaggcatcccaagtgttcagatgcaaatatatgtgcatatgagcaacactaaaggaagacagctaatttgtgtgtgtgtgtgtgtgtgtgtgtgtgtgtgtgtgtgtgacaataataattaaagaataagaggctatgactatgagagggggcaacataggtggagttggaggaagaaagaaaggagaaatgatttaaatgtagtgctaatatctaaaattctcaaaacaaatagtcatgaatgtagaagggaggctactagttggaagacaaagaggattactggcagtgggtaagaaaggataatggggtgaatacggtcaaaatagaccatgaacataaaaaacaaagtcatgggccctgaagataaagtgccttccctctgctaggtactacatacttacttaatagccagagcttatttgcaatcaaacagttaaacatactttcataggattcatttacttcatatgaattatcaaagcacacatgagcacaccattttagcagcacatgttcaaagtagttcataggcaaacttctgccattgctacatagagttaccataaataaataagtcaataatttgaaagcttattttgatgagaagactcaaaaaaactcacatttttttctcccctcggaggcatttcatagacaaagaaagagaagtgaattgaggacctgatgcttaccttttttcttctgacttgagaaaccatgtccactggtgttaggttaaagcaaccactgttagactttaatggggagaatgtgtttctgattgtcattcaagataaagctcactgtttgatctaagtccaccatcaatcacaaaggagcccttaaataaaatcttaatattcaatgcaaattatctatgttataaagttttaatgttgcagagaccagatccccaaaacagtccaaggcagaatgtaaaacaattatttctgtacagactatatactgacaatgcttaggataagggtctaaggaggaaatatctggaataagcataatagcagaattttgcaaaagcacatgggacctctttcataagaatgggttctatttactgagaagcaatgctcagaagtttttaaaatgtaaatataattttgctataaaactcagcaattaaaagtgttataaaatacatgctgataactaaaataaaaacagagcatctttccctttgttaagagattattcttattctctgctgttaccaaatgtaggcatcccaaagaaggctttgggaaacatggtttcaaatcactgctctggccttacctgcctagaccttcactctttactgcccccctatctcacagtcctcaactgtaaatcatttttctccacacattgtgattatccgatggactgccatttttttctttttttaagtagtagtctttttgcttttttaaagatttatttatttgctgtggatacagtgttctgtctgcatgaatgcctgcagtccagaagagggcatcagatcccactagaggtggttatgagctactatgtggttgctgggaattgaacttggggacctctgggagagcagccagtgctcttaacctctgagccatctctccagccccacaaccattcttgaagtcaatgaaatcaaataccagcaagcgatttttgttagttcatttgcatttactttccatcttaatcagccaatacctcatatgtaaattactaaaccctccaagatattttttcagctcatgatttttgatagatatcatattggtccaccaaaggtatttgcactctcatcacttaatgctattagtgtgttaccttgaacagcaaaaggctctacagatgcaattcattaagttcaagctgttgagatcaggaatatttgaagtccaggtgggtgagcacaactcagtattgagagaagaagaatcagtcagagaaagaaatgtgatcacataaacaggccagagtgatgtaaggatgaggtcataagccaaggaatggagaaactgggaaaacagccagcaaacagaagaagcactaatccactgaatcattgattctagtccatggacttacttcagacttctgagcccagaattgcaagataataagtcagacctgcctcaagccatttaacatatggtaatttattatcaagacaacaagaaaggaatatatcccctcatcttagtttctgtgtccacagccctggttatagtctgtctttcccaaaacacctgccagtctttttactgcattccttccttttaaaaatgatttgtttatttattttatgtgtatgagtattttctctgaatgtatgtctatattccacatgcatgcctggtaactgcagaggccagaagagaacatggaagttacatatggctgtaaactgtcatgtggatactaggaattgaacctagaaccttggagaaagcaaatgattttgacagctgagacagctatctcttcagccctactagaccacttcttagcctacttaacagtagtttctctataatcagtagtctcctcagcaaaggactcctgaacactttctcttgtatcccaccccaagcaatcataaaatttcctcatgatgaccttcctttacctctctcaacaatctgtatcttccagtcttgcttgcaaacacatacatgtccctctttgactttccaagtggtgcaacccatagctaggattttcccaaaatgcaaccctccacacaccttttcacagagagtctccaaggccttgatgaataattatccctccagagtgccacctcttggtttcttagatgtcatgagctgtaactactggatgtgtccatctatccatctttagacccttcaccatgtactttggacacatcgattcatgggtctgtctgtcatcattttttaagatatgatgaaatgattactaaggggaggaagtgacaattatctgtggttgcatggcatacatcttgacacataatagttacatgttatatgttgaaatgagctaaattattgaattaaactatgtaggattgtgtatcccttcaaagattagtttctaataaaggaagggagattgtttaacacttaaatgaaataatactgagaagctgtgatagacatatctgtccctagggaaataagttttcatgtgtgctataaaatgtcacaattcattctgtcatttatatcctggtaaacctctgcacaacaaggaatagtagaaaaggaatcaggattcagtgatggattttaagttcaaaaatacaaataaataggctggggagatggctcagtgggtaaaagactcaacaggtataaggacctgagttcagatctcaccaaacatccttgtaaaagctgagtgtggtagtgagaacctgtttctcattccctgggtgatggcagaaaaagaggatccatggagcacacaggccagttagtctagtcaaaatggcaaggtccatgttccatacaaaacggccatccctctggtctttgcacatgtatgcacatgcatatactacatatcatacagacacagacacacacacagacacacacacagacacacacacacacacactcacacacacacacacacagagagagcgagagagagagagnnnnnnnnnnnnnnnnnnnnnnnnnnnnnnnnnaaagaggaggagagaggaagagggagagagagagagagagagagagagagagagagagagagagattgtgtctatttgatgctggcaagatttagcaaatgaaggggaaagatgtagcaggataatgcatagtttaaaatctgcattcattattggaattcactgaaactctccataatgatctcccattgccaaattcatcgtatcatatggctaaaaggttaataggaccttcttgagacttatttttgttgcttcatttactggagagctagaaataaattgtgagagatatcttacttgaaaattactctacctgggtgctgcagattattaggccatagatcctaccagaaaagctgggatatgagcaggactaagctatacacttggcttttctctacaacccagaaaacactagtaaattccctgaacagggaggcagggacttgcagtattctacttgtgagatagaatttttgctaaaacagcagactaagcatcttagctctttttctttatttcccccgctttctttttcagacctgaggttcccagacaactgaagaggtacggttatttgcaaggttttgaagctgtttccattagcacacacacatttctagctgctcagtgatatcctctttccctgttaaatgctctcccttcctgtctaaaacctggcattgatgcggtgcagttaatgcatacagctcagttccttccagtcaattgtctttaaagtattaaaaatactacccagccgtccctcagcccatagcccttcctcttgatgaacttattcagtctctctactgtgttgtcgccattgttcttttccccataaccacacctccgtctctatgccttccaaaatttcctgtgcaaacagttctaactatagcttaaacatggaaggttgccatttccttcattgttatctatttctaaatacttaggtgttcgcttccccctataactttcctaacaattatttaaaaatgtgtagacctgcaagaatttaagccatccttttatactgcatttataattctgctatatttctgccacattctccataatatcagatcattggcattctatatcaaaccctcagcacaattcttgtataagcttccggtttagacagtaatatacctgctagattcctgccttgatagttaaccagaattatcaacttaacttgatttagaatcacacaagagatatgccttttgagtgtgtttatgaagatgtttccagagaggtttaggggacaaggaaggacccattatgactgtgggtggttccattctatgggctaggatcctgggctgaaataaaggaaaacaataataatttaagtgttaatctcagtctgttttctgactatggctacaaagtgatcagtagccttacacagcagtcacagtgcttgttctgcatgatggacacatgatctcaaaccaggagccaaaataatcccttcctttcataagctatttggtcaggtgttttgtgatagcaagaagaaaagcagtcaacacacctaggtagcccttaaaaaatattttttataactggcctatggatactaaaattatgtttaattgaatattaactatatatgccatgtattggtacacttaattaaatatgtgtggacgcacagttaaacattttgcatttctgcgttttgtcagtttgatctgaatcatttctgagaagtgttagaatctcgagttaaaatgggtaatacattccaacctccccattattctcaccacttcttcctcctacttacacttactatcaaagaaaatgagaaactgaagacattagaattgctcattagaaattaagtcaattttgtaagctatggtttcattgttggggaatgaaaatgaaacctataatttgatctcgacttcctgatgtgaaaaaaacctcctggattacaattccatctcccatatcccccagatctgcatgaggtaacaccctggtaaacactgacatgtcctgggaccaattcatgtctacccagtcaggaggtcactataaatcttatcatttattaacgcttcttctgctattgcacactagcaaaaacttccaagatttatgaataaaatgaatattaagtgtatgtatgtaagagaacaagatttaaactcttcaaaaccatccacacagctatttgtatagcaactttagttgttttactttgggggttcaaactaagtacttggaattatgacagcagaatttgagtttttggatctttttcttgattggcattgtgtagagaaagtaaaacatgtgaaaatgaaaatataatagaatcacacagagacataaagataagtagagaaagagactgttgcctggttcctatttctagatttggagcccttccccaggccagcctgcattgcttatgggtcttgaagacataactacatcctgaagacttccctcttttcctttaattccttgagttgatttgcatttacactgtacatgtaaatgcatgtatatttccatgttcacatgttttactttctctacacaatgccaatcaagaaaaagacccaagaactcaaattctgccatcataatcccaagtacttagtttgaacccccaaagtaaaacatctaaagtatacagctatcatggcaaacttgttacaactgagaaatgtgtcttgaccacttctgagatcagaagatgatcagtcatcagttctcaccatgtcttttacgtttaacacatacctgaactacaaagcctggataactaccatccatccaacttgaacaaaattcgagaaaagacatcaatggcagtttttcaagttgcagtaaattctgtcattattgggaagagccatttatcctagagccaaaggaactctctaccctttccccttttagttcgtttgggccattctatttcctccctggtgcattcgaacttggtgatgaacgtgtgttctttttacactctcagcaatggaaagccatcagttcacagtcaactaccaatttcatttactacagtaaacagaatcgcttctcaagtcattagtatctccaggaacaatgcttgaattaagttggaattacaataggtagaatatacagttctgaagctaaatccacttctatacaggggttctcatacacatgatgaggtgagaggaaaagatggttttgaatgtggtatctacttccatgtagaacaggtgcatcccttgacttctttctagaataacagcatcttaattgtgttagtgactttggaagacagtcaaacaaagtatccaagtggttcttgtccccagaagcagtcctggtcctttgtttcactgagataggacatggcataaggttcagtgggttgggaatctatgggaagaggcctgattgcaagcagcttcctgtgacagaaaaagtctgaaatcttaatcctagaattcactcttaggacactttcttgcccgaaacatcatcacattctcccgtcttgtgtatcagcaataagggtgctgtggtttttctcctgtctaccaagcaatgttgacatatgtcttaactgatttataatttgaataaggaagagaacattaatgaaagttgacttaagtgtataagcaatgcatttctcaagccccacccccccgccctcccacccaagaccttgccctgtcatctaataacaagtacttgtatcacatgaactaatcaccacctcaagttcagcacttcagaaatagaagtatccaatctctgcatgaaagagaaatggaagttgacaccaggcatttctggtttagccaaaacaccttacttatcaaagctttcaggattggaacccaagtcactgatgatactattacatctatctgtacttgtaaagtaatgtaacattagttcctatttagacgtctgcatgtcacacacacacccatctcacaagctagatattttcagattccagatgccactttgactacatcattcccttccaaatatctgttagtggctgccatctccaaatcaaatccttttttcctgatataaaaacacttctggatatggaaataaaccatgtttcctctgaactgaagcattcccttcagggtgtggccttctaaagattcaagatggaagcttcttaaaattagaagtgaatgagacctagaaggcctggaaagtaaacaaaaatcaccggtctcaaaatgtcactgaaggttgaaaaatgtagaggtccttcccaaaatgtagacaagcaatgacctttgatggggagacaagatactccaaactgtagagcagcctgcaaaccagacatggagctccagagatacagctttcatcagtcagctctcatgctggggtgggctttttggtcatgcagttgcctttgagcctcctgaattactcctggcctgtttgcctgacaggaaccctagtaagctcaccagtccagtcagataagctaaggtggaatcatttccttggtcagttatcagtaccctgactggtgtgagaagatgtttcataggaaaagtcacacagtatttatccattctgctgtatgtgttatcttctgcactcaatcttagtcaaagacagggaagcaactaatcctgttctacagaatgaactatttatgaagcaatgtttctactatatggctttgctcaagttgtaatctacccacacatcatcactccaagcagcctctccactctgcctaactcctccaactatttaagggcagatgggaagctcagcatcccatccttgaatgctagttttatagctgcaatgcaggttttcagttaatcatacactatatgaaattgagtgttcctgtggtttattagagcctcatcgtcgccctgtatgtagtattgtgagtttccatagccgaagaaccagggcctgcatcccacatcataaaactcactgatgatcacacagtggctgtaaaaaaatttaatgattaattgacttataaataaaaacaaagtaactgtcttcatctaaatgatagcttggttcaggactatgaaatttcagagaaatttaatcatcagaaattctattctgacctctttgactttctctattgctccaggcgggcccttttagtgatttttgtattcattttcttaatccaaaaatggaagtaaggcttgtcatctgtcttactcacagagagtggtgaggagtattctagtcgatgcaaggcacacagctaatacaaagtttaataaaaatgataaataatgtccattataaaattgaaccattgttcaatttctactgccctttcggtgctttgattcagttctccctcactgaaatttgagaactttaatctgatgaaatgttttactaataaccatcggcttcctgcattaaccttttcttatcattaggtacacctggatggcatgaaattattcttttaaagaaatcaatacatcactgtaagtgcatagaaaacagctgctaatgagcttcagatgagagaaatctgttttaacacgtgatatcagaaattctaagaactttaatctgctgagctgattttgatggaataacattttaaccaatctcaaattgtattttccttaattatttccataatttctttaggcaaaattcctgttttcttgtcagagaagttaattttctttttctgtgaatttccaaaccaaatatttttttatatttctaagggaaaaaaaaacaaaaagtaaattctattaaatgacttcattacctcaaaactgtttatttaaaagcacttgtcaagtaatgatctcttgtgataaatcaaaagtcctaagactgagtagattttggaagttaggatgaggcttaacaaggcatcagatgattatttctagagagatagttggtgagtgctcaataaagtcaattaaaatcacctgacctggaaggaagaaggcaaatgtgccaacagagacagctgtaaacatctggaaagcagattacccacagttgtgggttttgtaattcttctgcttaaacccactgtcaaatgcatatcttaaagcctattacagtttataaacatttttgacagtgtgaactaatcaaccaaaacgtaggagtgataaaaaatgaagtaagcctcaaatctttttttttttaaataattctatctagaggcattgggaaagacaaagatatgaagtttcttcccttttattgaaaatagattcttttctcatataatatatcctgattgtagtttctgctctcgccactcctcgaggccctccccacctaccttcccctctggatccactccctttctgtctctcattataaaataacagacttccaagagacagcaaccaaacatgagaaaaagaaatataataaatttcatattgaagtcggacacagcagcccaacaggagggaaagaatcccaaaagcaggcaaaagagtcagagattctctcatcctcacagtcaaaatctcatagaaatactgagctattagctacaatatacactcaggggacatgatacagacccatggagtccctgtgcttgctgcttcagtctctgtgagttcacctgagccttgcttagttgatccagagggcagtgttctcctggtgtccttcactctctctggctcttataatctttccacctgctcttctgcaggattccttgagctctgaagagaggaatttaatggagacccccattttgaatcccttttcatgtaatgtctggctgtggatctttgcgtctgttctcatctgatgatgactgaataaggcaccaatctatgactcctaactctcttctcttctctctctctctttctctctctctctctctctctctctctctgtgtgtgtgtgtgtgtgtgtgtgtgtgtgtgtgtgtgtgtgtgtgaaatttttggttttaccctaggtctctgggctatctagtctctggttcttggttacccaaacagtgtcaggtatgggttccttcttgtggagtgagccttaagtcaaatcagacattggttggctattcccacaagttctatgccaccattaccttagcacatcttgcaagcaggacagattgtaggtcacagatttttgtggctgtgttcatgtccatgtttctctcttggtagtattttgagtatcttcccctcaccaaagagactagatgagtgttgtactcagcaatggggccttgctgtcagtttgttgagagtgaccttttgtcttagcaatggcctgggttgtttgggaatttccatgagacccccttggccaacccagttccaccactggaagccttgactggcaataagagatggccatttgagactctatccaccattactaggagtcctcattaggacaaccttcaaagattccaagaaagtttccactccactagttttccacccctcccaaggcctcccaattctagctgtctctctcaacactctctccctctaccccaccccaccactcacctgatccccatctctcatctccacatgccccaatctgcctgtgaagttctgaagaagttcagcatctgtattgcatgtgaatttcatcctccctggcttctcgccttatgccagatacaggctcgggtctggagcattttctcataagtcctttatgatagctcctcttataggcacatcctatcccttgtcccagagctctagctgcactggaattgcagttatttcttggtacaaaagataacacagtctgacccatattggcctttaaagtttttatgactttctaaatattgtctgttgttgttcctttgttttctatagtactggggttcacacccagtcttgagcatgctaggcaaaggtggaacacaccgcccaccctctagctcgtgaatctctttaagcaatttctctatttctctggcatagggtctctgccacacactttgctggaagcatcccttccttaaccttctacttgctatctgatgacaggcacccatccttcagtgtcaactcagctctggagattccaagaccaagttattttcacctagttatactgacttaaagcacctgagatttactctgattaacagaaatgctaattagtgtcattaagaaacactgtttccccaaatatttatgttcatgaagcagaaacaatacctaaactgttaagcactgagctctggtaccaatcatgtggactgcatgtcagggacttggtgatttttgctaaatcaaaatgcaaacagctaatctttcactataactcattgaatagaaaactataaagataatctagcagtgtgggaataagaaatagccataagcgagtttaaagcagaattcagaacatgatgaaaatagaatggctttagatttcaggaaattaaaaacacacaaaaatgatgttgtataagttctgtgctaattagtatgataaaaataaggttaatattcttatttttaagaaaaattaagtagggggaaataactagtatgcaacatgattcttatacaggattataatcacttattaagtttttactgttgctggaatttatttcaccttttgtagtgcttagcctatatcagaaaatcctcattcaagtctttctgaattaataaaatttaaaggaacttgaatcctaattatttttttatttcagaattctttaaacatcaaacatttcttagaccatagttttagccactgtcagctggtgaccaggtgttttaaaattaagaccataagaaccaataagagtgctgtgaaggttcaaccttcaaagtcagagttccagcaagcctgaaaatgaaatgttaagatgtggaaacaaaagtaagggttcatttacttacccaacacctgcccgtacacaatcggctcaagcccttattcattagatgaaacctacaattcaagtccaaatcatgaaatgaagtccacttgcagaagactctggaagcctgaaacagcatatccaaaagactgccaagattttttctgctaagtagtactccagtgtaaatgtaccacaatttctctatccattcttcggttgaggggcatctaggctgcttccagtttctggctattgcaaataatcctgctatgaacatggttgaacatatgtccttgttatatgtttgtgcttcttttgggtatatgcctaggagtggaattgctgtatcttgtggtagactcattcccaatttcttgaggagtccgccatactgatttccacagtggctgtacaagttggcactcccaccagcagtggaggagtgttcctctttctctgcatcctctccagcataaactgtcattagtatttttgattttagccattctgacaggagtaagatggtatctcagagttgttttgatttgcatttccctgatgactaaggatgttgagcactttctcatgtgtctttcagccattttagattcctctattgagaattgtctatttagttctgtagcccacattttaattggattgtttggtgtttgggggactagcttcttgagttcattgtatattttggagatcagccctctgtcagatgtggggttggtgaatatcttttcccaatatgtgggctgccattttgtcttgctgactgtgtcctttgccttacagaagcttctcagtttcaggaggtcccatttatcaattgttgatctcagtgtctgtgctactggtgtaatgttcaggaagcagtttcctgtaccgattaattcaagggtatttcccactttgtgttctaataggtttagtgtagctggatttatgttgagatctttgatccattttgacttaagttttgtgcaaggcgataggcttgggtctaactgcagtcttctacatgtctgcaaccaattannnnnnnnnnnnnnnnnnnnnnnnnnnnnnnnnnnnnnnnnnnnnnnnnnnnnnnnnnnnnnnnnnnnnnnnnnnnnnnnnnnnnnnnnnnnnnnnnnnnnnnnnnnnnnnnnnnnnnnnnnnnnnnnnnnnnnnnnnnnnnnnnnnnnnnnnnnnnnnnnnnnnnnnnnnnnnnnnnnnnnnnnnnnnnnnnnnnnnnnnnnnnnnnnnnnnnnnnnnnnnnnnnnnnnnnnnnnnnnnnnnnnnnnnnnnnnnnnnnnnnnnnnnnnnnnnnnnnnnnatatatgctaattgaaactcaaatatgtgatgaatccaaggtgtttcagagagtgctcacctgtgcatgcaaatttgatttcatctttagtaagtaataaagttatatgcttgccaaaaaaaattgacacactggaagacaaatgtcacacaatttcaattttatgtgtaacctagaaatgatgaacttatgaaacagagagcagaactgtgactattaggcttcaatgtgggtcttttaacaatggggaaacgattgctttaaggatataaaactgcagttggacaagaggcatggactctgtgaaggcttgaggtctactaagagcatgataaatatggttgataacaatacgctatattttaaaagttgtgagataatatactttaagtgttctcaaaacaaaaatgatgaatatgtgtgatataacatgttaattggtttaatttagccatgccattgtgaacatactgtactgtgtatcataattgtgcatgactttatttatgagctaaataaataaatggaaaaaaagatatctgactttacaggccacatgaataggaaaaaaaagactgccaagagtccccaaacagaatgctggctgttatggatcttcaataatcccacattcaataagaatccctgttttaaagtaagaacacactgatgctatagcatcaaggaattacttaacattaaatatgtataaaaacattgtacaacttcattcatggtttcatcatcttattaattaaatttgggtttttttgatgatttcaaacatgaacacactaaacactctcatattaccccacccacatgactaatatcacatagtttgcatttatttttaaaatgtaaaattttgtaaatttggaaggtaacaaaattattagattcctttagtaatgttttcccttaacaaagcttcttatcttcagaatgaagtctgatcacccacaatttaggctttcttctgttctacacttcagaccataatgtttttcaagttattatgattaaaatatatagtgttttattatatacatggacaggatacccaaaaataacccctacatttatatacacagaaaaaattcatagtatattcttgactgacagtatcttcttatctacagaaagaaaaaaatagaaaagagaaaaagaaaagtgaaatggaactagaagaaagcaaggggatagagaggggaaaggaggaggtggaagggaaagccagaaaagagagtggggggaggaggagggatggaaaggaaaagtggcaaagggaagaaagaaaggggagggaggggggattgggggaaggggagaagaaagctcaaacttcttagtagtccattgtttttgttcttaatataagagatttcatacatattgtcaccatagaaacataactttagagttgtaagagtacatttcaaaaatccattcatgctttgtttattaattaggttgctctttgacaattttatacatgtacaaaatacatagtgaccactctcaacccccatcctcttctccctaccatgcctgtgtacctgccttcttccctacaaatacctttcttctactcatgtctctgattatggctcagagtaacctttgtctacgttgataaaaagcatttatcaactcttaagagtctttgtcaggaaacttaagtggacagaatcataatatcatttcatatggataccattacttcttttcctatttattctttttatttctgtctcttgtctacgtgctataggcaatacttcaggcactttactgcacagaagaagaaggtggacattcttgtcttcttcctaaacttagtggaaatgctttaagatttttctccacttaacccagtgctggctataggattattgcaaacaactttggctaagctgaaatatagtctctatacctagtatctccatatctccatgattttttttatcatgaagtgatgttgggttttacaaaaggtcttttctgcatctactcacatgaacaaatgatttgaaattaagtatctcaatttttaaatatcacattatcagtttgtttatgttgaagcattcttaaatggagcagctgacaatgtttttatttttatatattaaataaacacaattcagtattgcctatgctttccacctcaatttcttaaactgtggttgcaattccatataaggagacataactagatgtgatggttatagggaaatttggtaaaagttttctgattacactataaaagaaaagattcaaaatcaaatgcacaatgaatccattgcattgtggtttgggcagtatccccatgctgtataacacaacttccctgcagccttggttatgaacacttatgcactttgcactgggcattccatcatgatatgtaccagcagccactgctttctgaaaacattcagctcagaatagccattgctctatgctatgaagtgcagtgcttttactatatacacaacacataatggcttcattatggaaggttaaacttttgtatttaaatgtttgatttttaaaattgtaggcttgaatttttatttttcaaaaattagtactatctgcttgggattaagctagaatttccaaagtgactaccttgtagtcatatgtatttgtgtaaaatggcattctcagcattgatatttgtaaaaaccaaactgtcagccaactctgaaaaacatgaaagatattctacatcctgaaatatcaaatacataggcaatattaaattctttatgtaaatataaataagcatgtctactttattagcatgcaagtttacattcatctttaataagttgtaaaatcatacattttttgaaaaaaattattaccagtaaaaatttcattaacatacctattttattgagctttatacttaaaattgtgtaagataatgtagtataaatggaatgtagtttccaatggaaaaatatgaagccttcctttattccatgaaagacaaagtggggaaatccagccagagaaaaggtgtccaatcaatcaattacagtagcttagtgagctctaaagagagacacacaaaatgatgaagatcaggaaccaggtcctaaaccaacttcctgaggacttctggatgagaccatttttttaactaagtgtgcaatgttgaatagaggattgctttgtatgaaaaagaatatgggtgtttggaattaacatataattccttgtaagagattgcattaagtaacagtaatactgaagttcattcttcattgaaaactctgaaaagatatttcatatggtaacagagactgtgggaggtggagtaaaaacataatatggaaagccctatacactatggaaagtcctacacattacagaaaaccctacacactatgggaaaccccatacactatgaaagaaaaaaaccgatgtattatgaaaggtcctaaacacaatggaaagccctacacactacagaaaatcatatacactatagaaaaccctgtattttgtggaaaggtatgtacattatgggaaaccctatacactatagaaatctctacacactatggaaaactctatactctatatgaaggagtttaaggttttttccagaaacaaacaagtgagaaattgttttgaaaatgtgacctgatttcagttttaccaagactattctagtgaaacacgtgattttgaattagatggaaacaagagacaattctcttatgaagctaacaaatgaaaagactttgtcccacatgagaaaacaagacatcaggtcagagcataagccagaccaacatggtccatgaagatgttgcagggataggatctgacaccactgagaattgtcggggccaataaagatggctccacttcatcttggctctaggtcatagagttcaaaactattcttactaagtcataagacctaaaggtcgaagggatggctacagtaggatgtttaatcttggccatgtgtgtcttatctaaataacaacagatttggtatgaggtgtaaattaatgtcaagagaagcttcaacatatgcacataatcagtgagacaaattcaatcataaaaaacagaaacttcagtttaaatcagtatttattaccgaaaagtaagtaaagcatcatgtttaatatgtaaactatcaaatatttatttaaatgtccacttattttcaagtgaaaatatgtataagacaaacatataaagatataagcagctagaagcataacacgtgggcagctccacaaatacaactgaaatataattcaatattgtgaattggagtgacgtcataatgcaccaaaatgcattccatatgaaaagacagacaagaagcatttccatcagacagcatacctttccccatgctttcccacttatacaaatagcctatgaacacaccattcagcaatgagtttgctatagcacagctctccctagggggaagtcatttagctgtagaggaacccactttatttcacatatcgcatgttacaacaccagcaccaaggaattcaaagacaccacatgatccacaaatagttcctctgcactgctcacaatttattattcagcattttgtagcaaaactatcgtaccctttatttgctactcaatataaggcattttgtgaagtttgtgcaaactatagtcatcaccttcaccaagattcatcatcacaatgccagagtaaagaactctgccagagatgaggagtgcaaagaacacaggacaccattctgtcttctcagcatgcttcttatttggtattaatatcaccagaacaaagctaccatgttcctgccatgtggacagtgctccaaggccatgagaaacacagtctagatccaacataggtcttagcgtgcttgtaaattacaactggagcacagatcaaattatagttgttaccctgactactgctagactaaagcgattccaccagaaccacttgatgatgtttgcagaagaatggaaggggtgttaaacacatttgtcgacagtgtctaatatcttaatatgaacaaaccaacacacataagaatttctctactccctgatgaaagaagaaaaagatagtatgaaaaaatatttagataaaatttataaccccatattttagcaaagtaagtccagatatactaaaataaagaggcatgcagaacgacagtatactgaattaataactaaaactttcccttcccagtgcatggctaccatgtaagtcccactacgataaaaactatgcactatgaaattcaggggttgagttttatcagagagagaagacaaattaagttctccaagcatccagcacaagaggccagtcatagtgcattctctggaatatgtttagtataaaaccacaggcaaccagcacagcactagagagacataacttcattttttcatcctgtttgacacaggtagaaaatatatctgaaaattcccacatgttgaaaaacacatgttgactctcattactattgtactaaaacccatggacagaaacaggaattccgggccaatgtctgcattcaaagtacacaagcttctgaaacaagctattgctactgattgtaggaacttttttaaggtgaaaccctctgaacatggataatatcaagaagaacctagttaataacttagttgcagattttacagcagcagtaatgaaattctcagagacaagggttggctagcaagtctctccaagaagatgggtgagtaactcagaatcataagagaattctgatggtttgtcaaataatcactaccatatatctacatatatataggaaaatataggtttaataatacaggatttttttttgctttcagagtaataaaaagtgctgttgactagtatctgaaataataagaatgcaaaggaagcgatttctcgttgctataaacattcatccatggcaaacaatgtggttggttcttgttttatttctataaagtacttttctacttgaagataatatttgattatattatttagtaagtagaataaagattaatttgtaaattccttaaaacaagacccttcattccttggagctggaacccataatgccttgtctcctggaatatatgactgttgttctgagtctgtggttactaagggtcattagtaaggacatgtgaggtctaccttcaaattgtgccttttagtcagaacacacaaaatccacttagagctgtaacacagaaagatctaactcattttcccacaagatgctgtgcaaaataccactacagattaaaatacagttgttgctgcaaagaggtaactgagccttagtcttctcctacccctggccttcaacactgcctttattggcttcatcaagaggtaacaaggatgtagcaaggcaggtctttcaaacaacaattaattcagtttaaaaatcagtagcgtgtatgctaaagtgagctagtgtgtttaatgctgagtggcagcagccatccacgtggctctcagacgcctaatgagtcaccatttctttagaagtattacctataaaatgtgtgggcagttattgatactataaacgtacctttgatccaaacagacttaaatacacacacagcaggcagctgtttggaggctgaaaccaccctctacatttccagtcaagtggaaataaggaaaagcagggggtaatcccaagaaattaaataaaagtggcagatttttcactaagaaaatcttgggaagtgaatatttctatagttatcatcttgaaggcatagtttcaaaaactgaaacacatggaactgttactttatgtaaatgaaacagaaatagtttttagaaaaggaaagaaaaagtaacactaacagtattgacatgagttggtaaagaagggcagtgtctcataaaacaaagaaatggtgaactttctatatggtttgcactaatacgtgacataaatcagcatttatttttagatagaaataattttaaaatttgataaaaataaaggattgcttataaaaaattggctgttaactcacctattataaagtacagtattaacaatcggtggcctacctagaggtcacactttcaactattaaatattttgagatagacttttgaaatactatttatgggaaaatttagctaaactacatatgctggcagtaattcttttacccatatataatgtaaacagaagctatgcagatgactcattatcttctctaatttatatcttctatgagcttcttgccattacacaatggcatgacttaattcctggcttgattgattagggacataaaacaccatcctgcactcaatcagcaccaacacaaggcttgttataaagcaaatgatattcaaataaaacaagtttttttgagtcattttcattggaatctcaaatctatttctttccaaaataagaaaaagagctacaaataaaacttcattcatggtttttctactattcacaacaaaacacaatggaaaccattgtcttccataccacatagaccttatgagaaagccactaatattctttatgtgtacatttcaactaatgtagcatttaaatattttaaaataggtttaccaatattctatgactattttaatgaaaaataataggaatgatttttatataaaatatttaatttttaaaacacaggctattcatgtcacataaatagttctaattttaggttatctgcttatggccagcagaagcatcatgtgtgacaaataagaataatttagatactgtcacttaaagtctgaaggtctaagactcaccatattaaaatttcagagacttgaatactctattttgctaaacttcaaaacctttcacttcctctaatgttttaataatttgttagtattcaatattcaaataaaaggaaaatatttttcttacattaattttgttataccaacaaaaataataccatcaaaaataaagtcgtcaactgaaaactcattttataggcatagagtgaaaattactttctttaaaatattcttactgtttcctgaatcatgtttttaaatgcaggttcacaaatcagataaagggcatgaggttaaactggcctttcagaacttttattcctatttaagattccaattaaaaatgtacagaacagctaaaactttccattttgcacattcaatttcccagagtttctaagtttataagtgatgagggagatgctggttatttacctttggttcagaataatttctatcttattcataaaaaaatgtggataccacagtgtatattatatatgcaattttcctggtctttaaaatttttacatacatttattttattttaaatatatgggtgttttgtctgcatgtttatctgtacaccaagtacgcaaggaatagcagaagagggtattggatgtcagaagagggtattgaatcctctggaactgcagtcacccatggttgtgagtcaccatagatgggaattgaactcaggtcctctgcaggagcagtaaatgttcccagaagccaagcccaaattctccagcccaaattctgggtcttcctttttaaaaatcacaatcttcctaaagtagcactgggaccttggaagaagcttgggtgtactggagacaccaaagctcctgcttaattagcttctcagggtactcatttacattcaacagataagctttgatgtttctctgactttgttgtaggacagtgaaccatggttactgctaatcacaggcaccctgaaatctcctcttatcctgtccctgagttgtcttttcacacctcagttacaagacatccacaaaagtgagagatgcttgctttctttgcatcccattcacctgtaaattgagagaaaacagtaagtttgccaaaggctaataccagcttgtgaggacttctgctacacaattgtcttcatgaaaaccatctgttgttgttccaatggcagttgaggaaacaatttaagcagacacataaggcaaactgaaaaattaaaaaatgtttctaaatgcatactttagtgttattgagactgcagagcactgggatcaaaactctgtcaactggccggaccctgcacccacagagctaggcggggcagggaagccaaacacacatgcagattgtgggtatacacctgtgatcttacaagtggaagtgggcgcagccatgtttgctaggacacatggccaatcgcctgaagaaagacaaatggtggtcttcctgaagctaagcaaacccaccatttataagagccacttgaagtcaaaggggagaattgaatgcttcaaaagagacaaaatagcactgttagaatgtcaatcagtggaaatataattatgtgaggagaataaaattgcacctaaaatttagaaatcaacatgctttaaaaattccatgttcaaggctttatatactaaacagagaatatttcaaaatagagtactgtatatcttaagctgttcaggctgcatccagctttgggttatagtaatcaaatcataattttatataaacattcaaatatgtacaccagcacaaacactaacacactaacactaatgtgtatatacacacattatcctaaaatatgagaaaattttactttgtataaaaactatatattacaagtgtgcaggagaatttctaaataaaaagtctgttttacaagttctcaataaaacaattatgaacatgaattccatgattaaagaaatgtgttcttttagaatataacttcaaaataagacaaaatgcaactccatggacggtattttaaagaaatactgattttttttatgcttgtttaaaatgtattacaatggcattataaatttaatactacaaaaagaatctttgtaaagagaggagggatgataaagtgtaccctgactagctcacacaaggaaagacaaatagatattgctatgagaccaaccagcccaagagcacattagtctcaggaagaaccaagactcgcaggaccctctccatggctttactccatctcatagctaagaagactcctccatgttaaatcttatgggtctggtgtaaaaataacaatataaaaatatgtacctccagcaacatctgctagatatagatggcaacaaagcaatactattttggttctagaaaccatacaaaaggtttggaaagcccatgttaggaaaaacagaaggaattgttacaagttcacttaggaaaataaacacttgtttagccttttgaaaaaaaaagtcaactttgggtatatattaaatgtcattggggctttaaaaacctggattggtgaactgttctggattaaaatcatcatttgtactttgggcaattgactatgaactcaatggttttgttaatttggataatttttaaatgtctcatttttaagtggtcagaatgtaagggatgaaacttactgtggccatgctgagcatttaatctttggatgttagaaataagagtttaaaaatcccatcattacattaatccccattaaaaattgtccagtgttctctaactctgaccctgcatcatccagctgaacacacatactgaagactccccttctaataggtttgttcgcaattacctcttttgcaagttgaattgtaactaaagtgaagaaatgattggaaaagcctagatttataagtagaaatgttttaagagatcagttgaacatcttactaagcagtgacatttcttccatagtttttatgtaaatctgtgcttttcctaattgatccagatagttttattcagagacatattttagcagaactgtaaagggaatgtacacattgtcagaaatcatcaccatgtaaaaatagccacaaagtaaaaggaaaagtgattagaattactaacactgtatatgaatgtggttatagagataaaactccatatttagagtttcctgggcaatttctcccaggttcatattgtattgtagagattaaaatttccgaagaggcagctcatcaatggatgtcataccaaaaagtacacattttccagaactaaggaaccaggatgaaaacaaagtgacattccaaacaccaaacctcccaacaataagtgaaatcatatttaacctaacaaattctccatgatttttattcaaactcagttcctaggattgcctcataaataatagcctcaagaccctaccctgcctggggagtggagggtagatggggtggggggtaggtcaggagtgggggaggagatgtggggatgatgggagggagagggagaagggattggcatgtgaaacaagcttgtgcctaatttgaactaatgaaaacaacaacaaagaaaaaaaaaaagaaatgcttctttaaagcaatcaagaacattaaggtttgaggatgtagctcaatggtagagtgcttgcctggcttttgcaaagccctgagttcaatctcaacctacacacacacacacacacacacacacacacacacacacacacacacacaactaccccatcttttgttctgatgctctgagtataactcattgaaagataagtgacagccatgttggtcactaaaggaaaacaatccaaggtctatgtgagataaagttatttctggcccctttgccacaataatgacttctttttttcagaaaagtagaaaactcttttcacagtatagatgccccagtaggtaaagctatgtttacagatgccctatatacagaaaaccctttggtcttccatttgaaggttctcagtcactataagaaatgttgcagagaatcatatcccagttgccaatgccctttgtctttttctcttacctcaatgggtaagcaccagactcaagaactgagcttgcctcactgtgtgatttgcatattagctttctataaatacactgagttaccagtaaactgctcagaaattagtttgaatacactagaagatatgaatagaaataactggttcctctagtccatcaccaaagctgtgttttcttgaaataaagatccattttgtatctcagtcctgggcagatggccaagatttcgattcatgaagttcataattctttagagtcttctggtacaacttctagtataatctgtaatgttctggttattctctctacaaagagataaggaaagattaaaatgcatgaaaatcaaaacggcataaaaatagcaaaatgtgaattatttggggatgaatactgagagtgcacagccaccttctttgtagtgcactttcaagaattatttacttcattacaatcttatcaggctcaattaatttacttgtcacttctacaacttcccatgatgcttcctcagtaagaatatattaatattttgtattcaaataagaacacttatttatgaaccaggaggctgaaaatattttgagacaatgggaccaagatacaaatagatgtttacaaatatgcttcatgttcagctcaaaatgggtttgttcttttttcacataggagatgataaccaatttctcaggacagtcaggagaagagtattatttccagtgtctaatttgtagtattgttgagcaaattaccatgtttatcaaggccttgtttatctcataaatagattgagaaccttggattaatctgggtcattaaggtctgatccttagacaagttacattaagcatcgtccacaattccaaatttgctccaattttaatcattagtctccaatttagaagctgaaggcttaacccagcaagaggtcactgtaacagacactaaaatataaaaatacctgagttgtattacatctaaggacactttttacccactgccctagagtgccaagctctgtggtgatgatttcaggtacattctttcttagttattgtcaccaacccccatagaacatcttcagaagccccccaatcttggaaaccccaggctctgtcctcttaaaggattcagaagcaaatcatctcttgcccaggtattctttctcctttccaatgactcattattctaacaggcctttcaaacaatattgtaaaaagctgttttcaccttttgttctctgatttttgtggtttcaatgctaaatgtcccccagaggctcatgtatttgaacactagttcccatccattggtactgtttaggaaaactgtgaaaagtttaaggggtgcagcttcactgaagaatgtgagggctgacatggagactctataacccagccttacttctataggttgttacatggtttctgccccctcactgcagacagtgtgatcagccactcacaaaccattgcagtcttgccttttctgctatgatgggctgtagtcactcaaactgtgagccagagcaacccctcctcccttaagttgcctcttctcaagtatgttgtcacagcacaaagaaaagtaacaaatatagtcatagtccctaaggaagttttctgggcacattattattttttaatcctgtgtttattgtaaagggtttatgtatagtattttcaaattaattaaaccttatataattcttaaataaattgtattttttaacagtccactctgccatgagagcaacaatcaaacgccatatttacagaattatcctattaaactaggcttatggaaaaattatctgtcaacagtatggggaaagtgtcttttccaggcagacaaggagccaagccatatgatagtaggctacaaggtaaaagaaaaacaagagttgtaaagaaaatcaatggagttaaagaaacatggcctcaagtacgtgtttcaacacatccctgcttagctccccaagttaatctctacatccttgtcttctcactcatccctggtcctccaaacctgacagcaaagcttttcctagtaccttccaataatgtgagtttccaactgttgccttcttagatctcttgctggtgtgggaacttacaaccattccagagccatggaagcagctgggatgcccatgtttgcatgtgtccttctgaaagcgcagcttgtattcttctttcagcagggctaggcagaggcccaaatcataaggttctgcctcctcagccctgctgactatcccccctggcatttctaaattctcccttttggattctgggagtggcataatttgtataatggttgagtgttcagtaaacagattggcattggcctcaggtactcattggttccccaacttttccttctaggctgtctgtcctacaacactgggtctggcacagggtgttcagtggaggcaagggagcttctaaaaacactgcagaacatttggctttggagtgccatatattctattcacactcacgataagattagtggccctacaataataatattactgcctctctaaacaaaggtgagccaatgacctacagctggagttttccataattacaacctacaggacttaaagcaatgccatggtgtggtttcagttttattttttcatgttcccttgctattcctgaaataaactggaataacaactgacttggcaaaatctcactcaccccatcacacctggtatccataggggagtagcagccaagattgagtgagcttgggaagcagtgccaagccactctgccccagcacttatattaaaaatcatagtatgttttcttaagaagggtttttaaaagctttcatatgcataatatttattatgtggagaatcttctgagcccctaagaaatacaggcaaacttaatgaatgaaaaaggtgcactctaatcttttgggaaaatctgcaaaggcattaaccagctttcaatggtctgtcccagataaagctatcttgatacactttgggcaacacatgcttttaagctctggagttgcaagcctgctgtccacaaagacagattgtaggctttcggctcatgtcagccacattgggttttgttgtttgcttgtttttacaatcaaagattttgtttaaatatacctgcctccctatctctacctgagcaagaggggccaggtgttaggcagcccactggctctcagctgtgatcaggttgaatggatagctagaggctaccaagttcaatggctgtcattagccctggcctgggttaccagggctgtactagtacctctgtgtatctgtacacatcggggtagaacctgcctcccttttccttcactgggaagtttgcctttctgtagataaataaatcatataaacatccaagcagtagaattaactgctgtcttccagacagggagaaagctttctgcatatctgaccacccccttaagagaatgcttcattctagctctggaaatgctataacctaaaaagtggttcaatactggcatcctgtggccagaggtattcatcaaatctctagaaatctcacatccttgggctaagaagctagaaacattccctggctatctgtgccaactagccttgtaccagtttctgaatgatgtctggttgcaatttctggagatagtcctgaccaggtgcattttgttagactgtcacattttcccagggttaatccattcacatgtaatcagataaaaaagcataacataaaatctagacaatttaccaagcaaagcaacatgatatcaaacgactgcacaaattgcttcaagcaaggctctcctgcctccaagctcacatgcagttttctctctaacagaaagtatgtctttagaggaagggtctagtactgctgcaagaggctcttgcttcgagtctgtgtattttgttttggccaacggctacaaaaatacttgccactacagcaataaatattataaattttctttattttactacaagaacgctgcctaagaggaaaatcaaacagaattacagaggactgttgttttttcctacttcctttcaaggtgtctataaagataaagatttgcagtgatgattacagtttaaagtagaacggctgtgttcctggcaaaaagtcagagcatccccgagaaccgaaccaccattgtgggtctcctccaccgccgttcatttcacaaatgactgacactaacttcagtggccttggagatgttcaaaacaatattagaggcagaaaaaaaaatagcaagaactccaaaatgacaggagcagaatggcaacaaagaaaaatcatgtatgaaaatgatgcatctaaactgaccgagtggctgctagcacacctgcggtagagagaccagctagaactggctgactgagcagggaaggacagaaaaccttctaggtgggacaaaatggcgaacttgccctttcttcactccatgttctcttcctctcaaaggctgctggctctttcttctaggggttggactttctttcgtgctcaaggtctctttgtgtacttcagtctcccagctcaatcctcaactgtagcaagaagccaagtgacactaatcctaaatattttaacagaacttgtctcccttcagatctatagtccagtgtctccaatagagaaaacctaactaaatatgtcctacagaaaaataaatacagctttgcaggatacagaactatacaagtactctgggaatcagcgtatttcccttagccttgaaatcctaatttacatagcagcatttctttccagaatagtgttgccagctagaaagttaaatcggaatagaaagagtggtagaaaatctgaagtagccaaatgccaattcagttggtaaggagtcatgacaatactttaaaatggctggtttctgaatgtattcttggaatatattagagagtagagaaataaatgtttttcttgttattttgtaccaacactcccttgttgaaaaatttcccatcaatcactagacttctagtttgggtttttatatttttgggaacttcatatatgagtattgtatttacattatttctccctctctaaccaccaactcctaccatgtcacaattctcttttaaatttatgatttatttaattgttctttttatatacacatgtatgttaacatgctgagtccattgtgtattgatggtttgtagatgtgtatagggctgggatggccacctgggattggggcttggcctgggagaagagcaatcctccctctctggtcagtcactgtttgcctgttgctcttcatctgtggatggggccttgtgagatttcctctatcactttggcatgtcaccctgtgttgtcattctgcagttcttattcaggtgaccatattgttgggatttcatagatgtagagcttcaaattcctgtcctccctttgacttttaagattagccatggtaaactaagtaaattaagaccaaatagaaaacaaacaaaaaaggaatttgtattctaaactcaccgaacatataaacaacagcatttctggttttgaaaatatatttaatgtgacttaaccaatgtcagtatcacaaaacttaaaacaacttaaatgaggaaaattttatttaccctaatgtgcctttcctgtgtcaagggtcacggggattaatccattgatgggtatttagctgaatttgtcacttgaaactgggtttgtttggaacaattatatgactgaggactgcatttaaaaaggtattttttaaccttagtctcttgttctatggagtcctctgcatcccgcctgtagcttcacctcatcaggtgctccctggcctctagaagcaatagaaccatcaccatcagagcagaatgaagccagtcccaggactgaagtgtcccagaacggaaaagggcaacaaaccatgaaggcacgtggactgaaacttttgaagccatgaacccaactaagtttttcttcctctaaattgttcctgatcttatattttgtcatagtgatgaaattctaacacagtgggtattgatgtccagcaaatgagagttcaaattctggctgtaaggcttaagattctgtattcttgtttctaaattctccctcttgctgagccctggcttccttacctggtggaaacagaatcttggacatgggtccttggtgattgatctgagagcctgaagcagggaaagggatcacaagctcccctaaacccaaggctcttccaaagcacccttctggccagttgatcttgtgcattttctcctccacgtcttaactgactaccagttgagccagcttttcctccttagtgcttttaacttcctcttggtcctgctaatgtcctcatcactatcactgaagaaaccacccatgtcctgttctctgtcttcagcctcaaccttctctcctccatactcagtagcaggcattgcttcatcaaaggcaaccgtctgagtttgagcccttgctcttttacttacatccacatgacttgtaagagtgacatgaattctctggtgacataactcaatatctacataataggggcaatgacttcagatggttgttaggactgacagtggtcacacacatgcaagcatgtagaaactaaacaagaaatgaaagctgttattctcttcatggtttttgctgttaccagtaccctctgcagctcccttttcctaacaaggtagtattatagccatgatgtttaagacatttgaaggtacccatctcactcaccaagaaatctcacatcattgagcactagacttcactcaacccaggaaagcaatcattgtatcactaggggatttaaaagaggagttgaggctgtttacagttctgaaaaaaaaaaaaccctctgcctaaagaagttattctctaaaatgtccatgattacaaccacccaaattaaatacccaacaggattcaataggggctgcactctgaatgacctgcctgtctttctccttggagcggcaattaaaacgctgtaattcactttaataacaattgtacctcatgtagctttaaactttaagagtttgcatattggatgtgtgcacttttatgggtttcctataacatagtctcttgatgggtccaagatgcttaaacatcttacctgacaattgtctgaaccacttgggtttcttgtcccatacaatgaagagataatatgcagggactccagtcaatgtaataaggaagccgaccccggtgctaaatgggtctgaataaagggagaggacaaccatgaagaggcaggtgaaggaaaacaatgctgggatgaacagaggcacctggaacacagccaaaagaaacagcttcacataaagctcaagagaccagggatggagggcattagttacattaccagccagtaggccccaactcatttaagcagcaaaacctctccaagcagcacagagcatatattaggtgtggtttcttaactttaacttggtttagaatgtttgaactaagtctcaggctaggaaaaggtgtttgctagtggatcatctattcaaattctttaactagcagtgtatccttataatttacagttgtcatcttaaaagattggtggtttgataattatgattagaacccattttcacaaggagtcaagagcaccagtggccatgctccatgttaacacctccctgtgaatattgatttcctgttgagactcacactctgacctgatgggaataaaacaggccaactcctagtcaacagctaataaagatgctgcaagcatgtggcgatgaatgcaattagaaacagatcctgataacatggctggcagcattatcagtgctatgtcttaaaagcaagcactgacccatggacagctggggctaagaagatgacaagactgctctcttgccctcccacaggaaaatggtggttacggtaaatgggtgtcctgcttggcaacaagcaagctcttcctttgttatttcatattttttagttcagtggttctcaaccttcccaatgctgagacccttttatacagttcctcacgttatggtgacccaaaccataaggtttcttcgttgctacttcataactgtaattttgctactgttatgactcgtaatgtaattatcagagttttccgactgtcttaggagacccatgtgaaaggtcagtcggcctccaggttccccaggttgagaaccattgctttagagtatatgggggaagctgctctactacaaggttaacaagttaaaacacttactaatctgtaaagcagcaccccttcccagttacaactaatgaagtactttctttcacagcccagctgtgtcaacaactggttctgaagacagacaggagtatcccaccctctgaacacacaatgccatgcatgaaaacccaatgaaaaacctcttaacactaactgttctaaacacataaaaatctgtgatgagttcactatatcatacttcaaaatacatatactttccgtaagcaaagcatattagcaagtgcttcctgcaagagttaaatatgttacactgaaggaccacaccccaccccaacctccccatcaccaggttctgacaaaaagaggtctaggtattaagagagagatttatgtaaacccatcaagatggttgaggttaccttgaaaggacgatgcatatctggacgtttgtatcgaagataaatcaacccagcaactgccagccccataaaaagccacctggcaaaactgaggaaattcagaagactgtagagatctccggagaagagcattatcatcgtcaaaggatgctggcagtggaggagaggagacaaagtaagtgcccagaactgagaaggaggcggcaattccaagcaacaacattataagtgtccttccaatggttatttataacagaagtcaccatcctgatggaaacctagattccacaaacttcttttccatattgtgttctgcaactaagcctcagctggagggtgctgtcatcaccccagtttcagttggaactttatgtgaatctgctgttttgttactttgtcagttcctttcttttcactgacaaggagcaaaagtattttctgttgctgtttaggttttgtgtacatgtgtgttcatctatatgcatgtacataaatgcaggtatgtttataaatgcatgtggaggccagaggacaaacttggctattgttctcagcctgtcattcctcaagtaactaccctgtgagatgggggtctctcattggcctagaactggccagataggctagggtggctggcaggccagtgatctccagggatctccctgtctctgcctccccagcactgggattatgaacacaagccactatgccagcaattttaaaaatgtggttctggggggactaaactcaggttctcaagctgtcaaggctagcacagtatacaagcttcaccttactctagacaatgtgtttccaaagaataaaaagagaaaaaaagacattcagtcattcaagatcaatgtagaatcaattattagtaagttcccatcataaatattaaatgcggactccactagaaaacttaaaggatgctctgaggtgatttctgagatgctctagggatccatacacgggaaacaactacgtggaggtgaatgttttggttactgaatgcaaaacattgaccttttcctgctccaggtcaactctccccttgtgctaactgcatgtgaccctcaagaccaggaaagaaggaagcctagagagtaggccagtaatcctctgcagtgaaacagccaaggatggctcgactgatagcagaggcttcaatgaaagccctcttcatggaataatacatcctgttgccacaagtgacgttagcctctagattcctccctgagtgtgtgcacactttaaaaagaaatttcagggagacattctgaaacaaattaaatgcacagagaagaaaaaagtgttcagtgcttcctagggcactctcgacagcacattccagttgagaaaaaaaatgttactaaaataaaaatgactatagcattgccaatgggtatttgagggctcttacaccttttacagtcttttgtatcccacatttcacaaatattgttcccggcatagagaattccacagcttcaatttacatgtgggctttccctttcttctctgtaaggttgactctcacaggtctcagttacaatcagagaaccatttcactgcttagtgtttcatctacgcttttattctgttgtgtgtgtttcattatgacgggtccaggaggagacaacgggtaatgcctgcacagtctgcttttagctgagctctggtcagtaggtgagactgtgtccttactgttttccccttctttcctttcctctgccaaggaaagaagccacatccctcacttcccattataaagcttgcaaattttttccaaggtgaaagagaagtgagatgaagcatacccagggcatcccatacacatcagaaacacagagtcacaggaagccagggcaaaatctctggccttacaaacatgataccacctgagttacactgagcaccaactgagtgctgaattaagatgcctgttcccattccctcttttgctaaaggctttgtgaggctcagtctaaatatacgtgttaatgtgcattaccaaaacaataacagctggcagaggagtgtgcttgtggacatgaatcatggagaggatttctggaaggtgcccttctcgggaggcaacatagaataacctggtgggagaaaaacatgggaggtgttgactatatagaatcaatcattcaaagaggtaatatgctgaaacccccaatgcaatatgtatgcatctttctcacactcaacatgttggcattcttagctggtcatttgcagacaaagggcagatttcatcctaagtctcattttaagacgtacaatacctggggcatacccttttatgctttgaggaaaagcatggcagcatctcactgagtagagcttttcctacaaacgaagagctgttggcaaagtcagttctagattgctagtgtcaatccaatctagcacacgtgttttgcacacacatgtacatgcatgtggcattcatatctatctgatttagattgtaacataaggaaacaaaagagattttcgtaccatcaaacaaagcaaaagggttacagattgcggagtggttatttctgctttctactttactctttttcgtggcaccttcaggaaaacaaaagactttatcgccagaaataaaagctgttattagactctgtagacagactctaaaaaatgctcagagtgagctatgtgtagacacgcagcgccctctactggacagaatcaaacatgcttcacttgtatctgccacaaacttgcatatccctttaaaaacaacaggttcggaagcactattgcttttctctttaaaagttatccttatcacatccaatctctaaaacagaaatgtgtttctgaaaatacatgaactcgctcacctggagacagcgaacacgccaccgttcatggagccgaagcaggagagggcaacaaagatcgggactgctaatgagaaatttcccagcagccgctcggagaaggtctggggaaagaaagaacgaagcaaattaatgctttcccagaaagtggaataaaatgaaacaatttaggccaaacttgctctttgactttctattagcctggtgctacgtgaatgttttataatcctgctttttggttagggtcaaactgactccacagacaatcatcagaagcgggtaccatggcattgcttgtctcggacctgtggacaaaggtctaaacagtcgcctcctctctctcctcaaagcaacgatccatttactgaatctttatcagctatgatgtataacgtctctggctctgatcagaggaagaggctcaattcgggaattctacttttagagacagagatggttctgcacaatacctgccctttagcccagaaagcctcctatttatgatcggggtatagattcgccctcacaagagttacaggtatttgtttcacataccaaccctggtgctagacggtaaaacaagacaatcgacaagctgatcatttatggcgtgcgaatgagcccgtctgcaccgttctttcccccagtacagtcataccagctgaacctgtttaaggagttggccctcccccaccctaggaagctgtcatttccttccagggtttcctgtaaaaagctagaacacaattccaatcctgacaagtgacaggaaatataaaaggtagaaaaagttctgagatttcctgtgggctgtcacacatgccaccctgtacatttctatgaaggatacactttatatttttttatgtatgatttttttcattatttcttgatgcagctggggctatgcaattaacagaccccattatgctctccaaaaattagtgctgccctttgcctagaaaggtgaggcaactgaccagacacccagaagctttatacacgtcactgcccgatagtacgcctggcagtggacaaagcccttttcatacagtgaacccatacattggttcacacaaaatgagataattatcccctgtgggtggtgttgataggaagcgatcctattttaaaaggaactgactgacattcatgaatgggaatgtcattggatgcttttattttttttcacccttcctgcttttgagttaatgagtgaattctttcttacaagctaaaccgttcgagcaaaataaaagtctgtgtgacataacagcagtctcataacatgattttcggaaacaagtatgatcctgtggtcaaataaattggggggaattctttagaattatatgtatatatttcttatggagctacaatgcacactggcatcttcaagtattacagcaacatgtctttaacatctaattgactagttgttcccaaatttatgagtaccccaacgccactattccaaggttatgctagaaatagatagccatggtccacctgaaatttcaagaatgataatttgaagagagaattcaagtcaacatctgaaaagtttatacccagaaatgagaagagtgggtctcactttggaaatcaaaacctgcatttatttacattcagtaacagtccacctgtccttagagacatgctggggaaataattccttattctaaggaagccttggtggagttttaggcagctatatgtggaaatgttttctaggagattaaaatcaaaacaaagaggatctatggcagaggttagctgtatcataggatataccctaagtaaggtgtgctcaaaattttcagaatattatcattcaggtcaagaaaaaatcactgacttccaaaacccgttctcctcaagggaatcactacaaagctccatcaactcattaacctaaatttgaactggcatgattttaatgtggacttaccactgccacagcattggatagcaacaactcctcagcactgatagtcgtaaaataggccacatttgttaacacatagccaactgtgatgatggccatggaaatgcagatcgcaagggggatgtttctgtaatacacagacatcactcatgagacattatgaattctctgctaccaaagaatataaaagactggttccagtgaaggatgtcatggccttggccatgattgaaggctctgttggcatatggagggacattttatcagaacaaaatatctttgcaatttaatgagattcaatggaggcgggtattttgtataacttgtctattgcctcatccccaaatatataggtctgtccctttctttgttccatgaatgtgatcaccatgcttctactaacctcacagtcacctggaaggcttgttaaagcacaggccactgagcctatccccgagtttctgattcaatgggatcagtatcactcctatgttgctaggagaccctgatgctgctcactggggaccacatacctttctgatattaatccactgtactgacagctcctttttttttgaattttcttatttgaattagaaacaagattgtttcacatgtcaattccaattccaattccttctccctcccctcctccacggcctccccctgccaactaacaccctacctatcctgtaccctttctgctccccaggaagggtgaggccttccataagggggtcttctgagtctgtcatatcctttgggatagggcctaggcccacccccttgtgcctaggctcagggagtatccctctatgtgggatgggctcccaaagtccattcctatgctagggttaagtaataatctacactacaaggggccccatagatttctgaggtctcctgacagctttttaaacagagtcctccaatgcatctttcatattcagtgttttccccttaggcagcttgtggtgccaacaagtgaagactttcggaagcaagagagtgaggtgcatctatcttcatgacatgatggcaataggagttttgtatgtaagagaagtgttcacaataatgactactctgcatggccctgctgtgagttcagaggactctcaagatcataagcatctaataaagcagccgtgcagataatcccatgaaattagaggtgacatgctgtgaagtatggacgactggacagtgttgacactgtgtggcctcgagaagtacccagcacaaatgcaatattatgtcttcatttaatgcagtgggaaagccagaaagctactgaccctcataatttgattccatgttaccgatacacattacttgcttaacataatcgcctcttcagaccctttccagttcagacaacttaaaccttcaactccctgcacaaaagctggtcattttttttttctagccatcctgctatcagccctcatagatgcttccccctgctgggtgccactaatgaagacctcaatataattttttccaagatgaaaatgctgttctgaactaggaggggaaaggcatagccggccttactggccaagctagatgtgtttaacacactgagtcccagctcattatactgaatggcaatattccctgtcgagaacaggcaaaaggagctagtcagcaactgccattcattatgctgcttgcagcctgacacttgccctgatccccaaagccttcagccttgacctctaaatcctggcatctgaacatgaaagtagcagatgttctctatccccagtgtgaagaaggtcccgtggaatttcctgtgagcaccatgacaggccttgctagctgtaattgatatgtgctaaatttaagtcgaaataaaaaaaaaatccacctggccaatgaaatacaagggggtggtgcaattaaagatgaattctgtttctctgaaagtctggatgacattgcaaaggggtaagcaggaagagatgagttatatattccccttctcagtcattcattgacttatgtggaacttgggttatttcagctggtataatagccccacctggagactacatgctttgggtaaaggaagatggagatacaaagaaggggagatacagaccctccattccttccaagcacatgactgattaagatatgttaagattctattaaaaaaactgaggtgatattgctcagtgcagtggggtgactaactttcacaagataaggaatatggtcatcgatgtggaataatccttttgtgcagtgaagatttgccactcagattggtttaataaaaagccaattggcaggtagccaggcaggaatgataggagggacaaccaaactaggagaatgaagcgtgaagtcagaggagacacaagccagctgccaaggaagcaggacatgtagaagatgaggtaaaaagcatagataagaaatatgggttaatttaatgtaagatctgattagtaacaagcctgagctatcgaccaagcatttataatatatatgaagtctcccagtcagttatttagcaagtggctgctgtttatttgggagcagccggtcaggacaggaaaactgcctacaagtcataccatataatgcagaaaaataacagaaaaacacatctgaaacttttgactatggtcctcccagcaaaaactgagtttcctagccctgtatctcaaagctagacccctgcagggtccatttctcggtatgtatctcagtggggctttcattaccatctttgcagagggcaggcttagttaacccagccttctaggttattgtccttctttctcaggttgccactaacaaacgtaacagcagcagttatagctattgggctgttactggccccaacattctatgaaatattctacatatctgcctcattttgtccttggaaattcctgtaagctggaaacatcagcactattttattgatgaagaatagcatcttttgagtttaaataactgttcaaggatacctagctggtgagtgaaatccagtgtgcatgacctaacctgaaatcagggcatttttaaccctaaagtatgtactccctcacacaagtgtggctcccttagctctattaagttcatggaaattaagccatagaatattaagtgagttggggaagtctcatcaaaactacatttcttggagaatacgtgtaaaggaaggggaaacattcaatgatttttatcatgtttctgtacagcacaaattgtagtgtcagaagggtgtcctcagatatgttatcattttatggaactgattatttattgctattattattgtggttgttactattatttaaaagaaaaaatgttcacttgatgaatttccccaaacatgtttgtatacaaaaggggaaagagtctacatgcttgtcaaataaattgtaatgagttattaacaaatgtgctgtggagccaaatatggtaggtagcccttgggaggggcaaccacaggcaactgaaatatgaaatccgaagagtgagatggtatattgtggagtacaataagccatgatcctctctaattagataaaatgaagccataggaattaagagacactgtggctacagagccactagcattgctgaccatctccatgttcctttccaatttgaaggaaggggaaagtatggggcagattctgtggttgccttgctgtaaacagcatcaattttctaaagcaagtagctggcctgatcggggctcggcgctatgtggttaagttctgtttacaagtatcaaagcctatgaaacactgtgtgagctgataaaagctatttgaccatgccagagtgatctttctggatgctttatatacagagggcagataagcactgttaggaacccaagaggaaggccagtggcacaggaaatgaaaggaattagaggaaggagcacagaggccaggggtgtttcaaagctctcaaattactgagaggcagacacccatcctaaatggtaacaaaagcattagctttttgatgaacacaaatgagacacctgtaaaccctcctctttctcaagtgtttgaatatgtttgctatgatgaacaaaacacaaatttagtgagaagaggtccctcatcctcaagagccttccgtcattacgtatgccttttccgattaacaggtaatgagtgtgtgtatgatacttttattagctgaaaattgtcttcaaaaatgtctcagatagtcttcctacttcttaatttaaattggcatctccagccattctggcacacaaggaagaatgttttattcttggaaactactaaactgaaagtctgaaatgtctgctcaggagctccttttccatttctttttgttatgggtgatggcttgttttccaaaagtgatggaagggtatttgtcttttaagaatctgcctagcccccacaaagacacttgatactgaagtagatgtgctgcatttccgaccattgtgaaatgatacataaaatgattaaataaaatgcacaatcatatgtttaagtaggaggtaactcccatatttttttaaacagagaagcccaggctgacaggggttagtgaactggatcaaagtcccagaagcagtgagtagagagctggaactcaaagccaacctcccaggtgctttgaactcctcatcttgactgtttagtgctgacttttttctcaagttcaagatccatgaggtcctggtatgtcaacagatgcacatggtgtttatgttaaaaaaaaaatccattatcaggccaattgttctattccatatctgatgccatgcatgtgtgactatgaatccaacagccactcaaagtggagaatctgctaagtatgctagtattaactaccagaaagattttttccagaatttcagtttgggcagaaggagctactgttgtaaaatcagaatgagtaaacccagcttgatgctgtagtccttcaaggaaacatcaaaattaatgggagttttgcaactcagatgaccagagtaaagccctaatcatttgaatttaggatagtccaagattgtttataacatgaaaaaaatgcctgaagactgttgtgacccaagccttttaatctcctgagtcaccatgatgacttagaaatcattgcccccattttatcccctcagtcaccatgatgacctagaactcactgccccccatattatctcctcagtcaccatgatgatctagaactcatcatcccccgttatctcctcagtcacgatgaggacctagaactcactaaaccctagggatgtgctttatgtttgaaatgagatatgagcccagacatagtagtagacaattaagctattaaaaaacaaaacaaacaaataaacacacatacaacctgctcttatatactctggaaccttctaagtggttcatgtttcaactttctatttagaatgcattattatttcaatgtattaatgggaaagaaaggacaaaaaagttgtgatcaagaagaacaaaacccagcaaacttcttaatgtaaaaagcaaaaagtaagtaagtaaaggaaaactagcatttttcaaagatttttaaaagtctgctgggaaacagggggcttagggattatgttcctgaaatgcagccttgcttcattgcagcataaagtatctataattatattaagtaccttccaattctaactatttattttagagacatacatgtttcagattttctctataatgactttgaaaggtttatcatttttttttcacaaatttgaccaggaaataatcaaacatcattaactctctcttttggattcaacaacttcctttctttcattatcactgctattaattttttaaattttcagactatggttgtgtatgacagaccaaatattaataagcttatttcaaaaaaaggcttcacacattttatgcacatgactttatgtccacacatgttattcatgcttcctgagccttgctcatagcactatcttcagcaatcccagaggttggactgtcccatgtggtcatgtactcactcacttttagcaatgggagggaggttataactattagtgacaattttctgtggttctgttcatatgcaactcctatttgttttcagggatttttgcctcagtgtcatttatggtagtgttgccacatctctagttttccattaagagtgggaataagatattaaaacatacaaaagaaacacatttgaggacatgcagaaagcaactgaggagaaggtgtagtttgacaataaaagaaaaaaaaacatattaagaggaaggaaaaaccagatgaacctgtttaacgttcttaaagttcttaaaggatctgtgttggtgcctaatgaccattctggagcacagttgaacatactgacacaagaagcatattgtgactgtgacgtaagtgcaaacaaagatagcactgagttcaggctccatcccccacttctcacggagcacagcaagactatgggtagctgtgctgacacattccaaatacagtaccattgtctcatctaaatctcaccattctctgtctccacagataaagaggtccagaaacagaaagagaagacagacagacctgggaggagatgtgagaaatgaatagacacagcttaagattggaggcccacaagaggctcaggagaaaacacacatatataggaatgcctaaaggggagcacagaaaaaaagacaaagaaaaaggtcaaataaaaaaaaaaggatcaagtttcccccaaaacctcacaggacaagtgaagagaaacataaatttacaactcagaaacatagggtaataagcaagcgcaaacataaatataagcattttatcctgcaaacactttatttttcgtcccactccctgaaataaactcatgactaaataaaattatgcagcaaaatgtagcatgagcataaattttcatttgtttccactttatacagtctcaaaaactccgcattgtgtgcatctcattttttctcattttctgaagatttagtgtgtgtcctctggatacattattgttatctatatttatcatgaacaaacacaagcatattttaggcaagttaagacaaaactgctttaaattaaatgctagcaattaaatcataggatgaaatatcttaatagtaataaattaaattccacagtagtggttagttcttaattttgttatgacatgcatataatatttctcttaccatttcattattttcctcattatctgacccaaagtatactgtggtctcagtgaaccactttttacaacagtgttccaaaaactcagatttatgaataaggcatgtaactacacaccagtttgtgttcctctttcaaaactacattattcctgagaggttgccacctagggaaaagcccagttaccagacttcctcatatgtaggagggaatgtgactcatttttaacaatgggaactgagtagatgagtgagttaaaagctaagatggctactaccctgtcctacctgggagctggtttttgttagtcaatgctccatcactgtagtgaaacctccacccgcccccaagagagtaaatatctgaataaatgagtgtcctctcattgttttgatgtcacctgaccctgttgcttgaggctgtgacaaggctgcactacacggctggagtgtgtaataggacaaaacctttcctctcatgttatgtccaaagagcaaaactgaggtaaaagaagggaacacggtcacataatctccttcaaaggtaaacttccattgactcaaagacctcccaggaggtctgtggagcagttttctcctagataaagagctctgtcctgaagggaagctccagtaagactccggatgttctaaggagaggtggaaattccatccttcagggaaatcccttaaaactcagaaagaaaacaactcaaggcttcaggaagtccctccagtcttcatctatatccagtaaggactattgagagacatgctcaagcatgtccagctacctctaagagacagagaccagctgagatgcctctacaaatgctgagctgcctgcaaattctgcagtgtacttgtgccaggttcccaggttttctgaaaaccctgagctagaatgaggcttttggtgacaggctagtctttgagtcattttgctcctgtaattaacctcttacctatactcctaaaagtaaccccaatgagtttattggttcatcaagttacactctgctagaatccacgttttagtctattgtcagttccctacattttgtcttcccaggaatagtgtctcacaataaagccacacctcttaatgattacatcacctcctaatagtaccacacttggaccacatctttatttctgtccattgtgggggagaggaatttatcctgaaaactgaagcaagactatttcctgaaaaaaccaaaccatgggaggaaatctgaattgcagaattaacacagacaaaagcctaccagggagccagacacacccaaaataggaagctctaaaatttaagaagtaacctttcggtggttgaaagccacaggcattatgtggattgactgttagttcaagaagcattaaccaaaataatcaaagaataaaggacttcctttgtatgtatccatttctttatatttatagattttaattagtgtagataaggctgaaaacataacctcattaagtaatattgtataatatattatcgagtttaccaaagatgagcaattggcataaaattctttatgaactaaatgacaatgtcaaatcaaagtggatatttatctaaacaaattagagaaaatcaatcattattcaattttcccagaaatagcagacacctcttatggtttgctatttttaagtaatacgagtctcttgaactcctgaaaatttccaccaatctaacaaagagaaaaacacaattatccacttttctccccaaggatgcaaaattaaacaaactccaatgatgaaagcaaggtggcatgtactgtgtctgcctactgctgggtgatatagacaaattggtgtcaaaaatcttcaagctgagttggggggtggtaggggaggaagggagggagaagggaactgggattttcctgtaattcaatcttgtttgtaattcaaataaaaaaatgataaaaaaaatcttcaacctgtaatgtacagtttgtaggcactgacaacatgttgcacacataaactaggccaatcacatttctgacagacaatgagaaatggtgcagatagacacatggccattcaatttgacaaacaaactattgcttctgccaccaaagttgcctccaatatctctgaccaatgatgtcaggtcaaattaatagcaatctttttaactttcacacctggtagtcaaattggatctctaggcatcaggatataaggaagacagtgaacaaaatgatggagtactcttaagttagttcaaccagttaaatctacttttgtcacttaattagcagaaccctctttaaaagaatgccgtgatcctgaattttaaggtaattttacaattatggccctaaaaagttcttttatgccttacttaatattttggtttcaactatgactttctaaggaatatcttaaatataaaaattaggcttaaaaactgtctgtatatagataattacataatttgtgtatatctgagcctgtaaagttcaaaataattttaatactatagtaattgaggaaaattttagtagaaaaagctaatctgagcaagaaaaaaagcattaagtagatgaaggagccagtagctatggtctggctttagtcaaggtggcaaaccccctgttgcagggcacatgacatagcagtttaggggaatgtgggaaagcgaaaaactagagttgatgggctaagcaccctgccagtttggagagataatatgtcattgtcaagaaagtgaggatggagactcctaggctagaagagttgacagctgcctgaaaaggtcacagaggcccacagaatggccgagcctggtcaagccctccctttcctcttctcaagctgtccagctatcaagattaatgttcccacaggaagtggaatgctgtgatcttttctctttcagcaaaaagtaaaccttttgaaaactacactttcatgcattcatcttatatttactaatatcttttcttaggtcacagttgcacaagcaaacctctctctgaagggaaaatattatcaaggcaaacatactgcctgatgactcggtgacacactacccaaaggaaacagaggggggtgcacaaaatcattgatccctcatgccctttctcttccataatttccctcatcttttctctcatatccccagaactaaaaatttccaaatatacaatcttaatgtaaatagtttggaggatctttaaatgtcaccccaactcttactttgatatttagtcaacttgatttcatgggatgattaggaagtctctacattccagtctgaaagttgggcctcagtcacaagtccatcactagcagaaacacaagaatattggattgatggagtctagaacccacttcctagaatgatcattcctccacaatttttgaaaaaagcatcctagaggattcactgaggcagggaagtaattgctcttaaaccagagtaccagaatgtagttttgcctcttctttttttgtctctcagaggacagaagaggcaccaactttccaatctcctctgtcctctaaagatgtgttgctgtcctcagcaggcacacagcacatcagagcactttccatcatcaccatctaaaagtgccagcctgactgaaagaaaaacgaccatcacagaagataatttagtggataagtgagttgtccaccctcctgattctacacagactctatgtgatcaaatcacggaccatggatcacaccaccataaacactcacagtgaggcttcataagtcactggattttataatgttggcatttatcaaaacttaattgtatccattattaacacctgaatttcaggagagtatacacaacaatactataaaggtaactgccaactgtatctagcaagctaactgacaccaagctcatggacttgaccaacttttccacatatcttctatttgctaattattataagtagagtgattcaaatatcaaatttacagaaattctctcagtggtggaatctaaaattcaaataggactgaggtaggagcctatcccccttaaaagacagtttatcctggattttcagattctggttcatcaaagtatacccccacacacacacaccctcagagaccctttccccctttttctaggtaggtctcagaacagtgttttgaagtctttctttatgtgttagttagcactagacaaattccactaaggaaataagtgtttcctgagtattttaaagcaccccaaggatttcctctaagtctccaatgaaaacatctttgaagggcattttcaggacagtttgtccctctcaagtataactgatttgtgcttctctctctctctctatctctctctctctctctctctctcatctctcatctctcatctcacacacacacggagagagagagagagagagagagagagagagagagagagagagagagagagagagagagagaaattgcacatgtgcgtgctcgtacctgcaaagaccagaggacagccttgggtagtttgggtagtttcacaggtgccttccatcttttatttgatatggtgcctctcttaggctggaacttctccaagtagccaaccaactgccaggggtctgtctgtctcttacatctacaagagtatgtttctttcctgttctgttttcctttgggggtttgggtttgttttttatttgtttgtttgtttgtttgggcaatttgaccaacacaagctagagttatatgtgattgagaaaccatttctattagattacctgtaggtagacaagcctgtgtgctgtggagcaatatttgtatactataaagatgcattgctctcattgttaataaaaagctgactggccaatggctgtgcagaattttctgggcagagagaatgctgggaaaaagagtgaagccaggagtcaccagccagcagccagaccaaaaggaagcagcatatgcaggacaggtaaaagccatgagcttggggcagcacatagatggatagaaatgggctaatttaagctataggaagtagttagtaataagcctgggctatgaaccaaacatttataattaataataaatctctgagtggttgtttggaaagggttggtggaacacagctgattgagattccccccctaaaaaaaaccctccaccaacacctgaaaaattgattgaattattgattgctgaataatatggaagggcctggatagttgtgggtgattctacccctaggcacatggtactggactgtattagaaagcaaactaagcaacacacaaaaagcaagccaataagcagcattcctttatagcctcagtttccattattgccttgaattcctgccctgacttctctcagtgatggagtgtggcctgagagctaaaaaataaactaaaccctttcttctcaaaaagttgcttttggtcatatgttcatcatagcaatagaaacctaagaatgacaaatcgttatgaccaggtcacacaccatggagtctaggaatgaagtttagtttctcacatttgcaaaccaagatgagctatttctctagcccaaatataacttacttttatgaaaaagacttttgtattctatggtttctcttaatttttaaaaaatattctatgtatataggtgttcttaactgctaagtaatctctacaaccctggtatgtgttaaattgtaaacttttttgtattttctttctaggacatctcctataagaaaaaaaatcttattaaaacaggaagagacagttactccatcagaagctaaaacttagactttttttaatcaattgaaataaaactaagttttatagtagccagaagacacaaaagagagcaaatttaagtcacttcaagaaaatgatgccattcttttaattcatactctttcttacatgactttcacaaccatgtgataagtcagcaaagatcccaaaagaagattccagaaaagtaaatgaaagcaacgggggaattttcatcccaccaaagtgttgtgtggatcccaagttataaaatctctcagaacacctgatttataaacagaataacaccactcaattttaataaaaagcaggaacctcctggattcatgcagcagtcacacacaaacatttttccttaaaacacagactgcctggaaaccaatgctggaccaaggatatgttacacctctgcaaggctccctgtcaaaacagtgtgcgattgcatagacatcacaactgcatttgtttgtgtttaatttttttctaatgtataatttacatataccaagtaccctggaaccaccacggggaaatacgctggtgataaaataagccaatatcaccactgtaaggattcaggcattatgctggcctgcccctgtcatctggcagtatgcactcaggcagtaccctggtcagcccagacttcaatggttgagtagtatgcacgtaggtgcaaaggacccctttaaaagaaagacacccccccccttctctctttttccctctctatttctagctgttccctggggcagacaggccattttcctttaactgtctccctcttctcttccgtcctatctctgtttctgtctttgtctctgtctcagtgtctctttccctcttttctcttttcttcctcccatttccctttctaataaaacttctcactaagctctgtctgtctggcatgcttgtcccctgtctcagacacccaggcttgccatggaatcctccaaggtcccccactcacattatcataacaaccactttgtaagaaaagtagcaaacacagaaaaatatggtttccatgtttctttggtgggtgcattccttcaaaagaaaagaaatatgccaagaagaaaagtatgtagtattctttttaatgtagaatagaatctatgtaattacttagaaaatacatttattatttttccaacatgggacaaaatattacttctcatgactatgaacccaaagagttttgaagtatttatatataataaacgtaactaatatttaatcctcagtgagcaatgttagtaattgtaaatatcataagcaatatttctttgtgttaccattggtacttctgttaatattttagcatgttagcttgttaaaagtattctgaaaatagaaaatcatgttttaaaagtgctgttttagtgatttcagagacttaagaaggccaaaaagaaaaaaagattaatgccagtcacaactactttcattcattaattttcttttaatcagaaaggacaaaaagaaggaagcttaataattaagcatggcacatggagaaagaaacatatggagaaatatatctgccacaaaattatagtgtgggggcattattataagaaataatgccttcaagataacttgaaaagtcataggctttaaattccaaagcattattcatattatttccatatataggaaaagctgaacagaaaatttcatgcaaacataagttatactcaatatggatttgtttagagtaattgagtaatattttaagcagcttttctctccaaaatagaaagagattttgaaattttttaataataaaattgtatagtaattggctgttatatcaacagaatgataaatgaagtggaataaattacctgaaaatatcttagtataggacataaaatttaatgtatattatcatatcatgagaagtgccataatttgtcagcttcataaaattaggggtattattactttacatatatatatgtgtgtgtttgtgtgtgcctgtgtctgtatgtgtgtgtttgtgtataaatatgtgtatacatgtatgtatgtgtgctatagatttactcccaaaataatgtgtgtatgaaagagagatttaaatgctctatacaaaaggctatgaccacaaaagcaatatacataaatgaaaatgcttattgtatttacatacaactgcaaaagttctgcaagctgacaactcaaacaaacaaaacaagagtgacatgggggaaaaatgacaaaataactataccactaggctgtgagtccaggccctagaactgcagaggaagaacagtggaaccaataacagaaagtagtgacccctggtgctggtaacagggaagcagtgactctcctttaaaaggcatttggcaacacagtgacctttaagtgctcattgcatactaaaagtagacatgacccagtagtcaatcctaatttcatgtacagacacataggaaatctatatctagcattattgcatcacagaaaaattgaaatgttttcaccatccaaaaagaaaaagagaaaacagaggtataccatccaccattaaaatggtgcccactaagaagtgaaggatacagaaatcaaatggaatagtgtgagattaaaaaaaaaaaaaaaaactggggcagatcggtagccacatgagtagaaaaagcagagtgtgggacataggaggtctctgaggtgagactgggaatgggacattaatggaggtaaacaacaccctggggaaagagacaataaatacacaaaaataacagaatgcccaagtttcaaagacaaatttatatgtatctttatccaagtgaaacaatccagtacatgtgatacacacacacacagggatgggaaaacggaggaccaaaattatccaagtgagtactattttgattcagtgtgattcacagactactcgtggctctacatttctctttcataatttgttggaattttcaaatttggccatctgttattattaaagagaaagagtgcatattaccatcttggaaatccaatgaaaatcattttcactgctattgaaaatgttactttcactcttctagcagagtataaaatatatgaaaaattgatcatcatctcactaagtggattattggattccaactgctttttttgagtcccagctactttaaaatgagataaataacatgttctcattaggagaattcagaaacaagataatcagggtgatctgggtatttaagtgtctctattcagaagggtagagtggacaggcagggtttagagttctggaatttccacacatttgtctctgtagaaatggcttcatttgacaccacctttagagaacagggagtccgctactctgcttagtcatggatttgtatcatcaacttgaaggtttaaaaaccacctagatacccagagtggagctttctaccatgctgacttacagcacagcttgtgattaatatatatagaaaacccccatgactcaaagcattgcatctctgagtttagtgcatacttgctttctcacagcccaatcacttggtcatctctccgtgacaagaggatactgtatcagagggttcaagtaaataaaaacttgcatatgatcaagaaaggaaatgtttaacctttcttacctaaaggcctacacagctactgaatagcacctcagatcttagacctctactcactgttcagctcacttactgcttttgtcattttcagacagacaacaaaagttaaccgtgtcttctgtatcaatttatctgtttcttctcccagtacaaaatacagaaagtggaagtttgactgtttgacagtatcaataacagagaaattaaatatagccactcagagataccaagaatctaagagctagggtacatgtgaagatactagagacaataaaagcagctattcctttacaatatcctgaaacttcgccatcttctcttcataatatttcttttttaatcttctaatctcataatctttcctaaatgacttggaatagattagttacttctactagtctagaaaccacatgcattatccacttgcagactaattttagaaagctgcatgacaaagctgctgattttactgttttaagagcagttctattaaatgctgcacaggacatgtctaatggtgatatttcctcaccaactaatatcaagacaaaagtcttgccatagccatattatagacctgtgtgacttattttctcaagtcaaatttattgtggttgaactacagcaaggggatatttaataaactaaggcatgcaggacatgccaatggaaaataatgtaaagacatgtaaagaaagataagtaagaatagaactattagtacatggtgataatatgaaaaaattgagacattgctattttttttccagagagaatagggaaagtttcacaccaaaatcagaaggagaaatggcatcatgaaaaaatcaatagaactgatactttggaaaggcagaacctggctgcttatagaagcccagtgatgtatagacaactcaagcctacttcacttacagcatcatgcattctaacctgctatcttcattttgtgcatgaagagtacatcagttcagtttcagctgttcacatattaatgcatctttgaatgttgtgctttaaaattaaactcaaaaccaatttcccacctctacaaaatacgaaggtgtttaattatagcattcacaactaatgtataccaaggctgagagctggtgggcctttcttgtaggtagaactatctactttacctctataaagaaaaaagaaagaacataaatgaaagaaagaaaatacagcacagaagcaatggccagcaaattcaaagaaccataaacctatttccttagaaaaccaagcacaaaaataagctacgattttgtaaaatagcctccatgtcaaagattacaaatgcttaactcaaaatgagataaattctgcttcagagagagtggtgtttcaaacaagggtagcatttacctgaagataatgagcaaattgaacactaagttaaggcaaaggagaagaaagaaagaaagaaagaaagaaagaaagaaagaaagaaagaaagaaagaaaggaaggaaggaaggaaggaaggaaggaaggaaggaaggaaggaagaaagaaagaaagggctcatcatgtgtacaaccacagacctggtaatccctgagagttgtaaatagctaacagaatcatgttgtgaagaaaagtaaaaatcaagtctggtgtgatgatgcacatctttaatcctggcatttggaaggcagaggcaggtgaatctctgtgagtataggacagcctggtttacagattgaattctagggcaggcagggctgcatacaagggagaccttgtctcaaaagcacccccaccaaaaaagaagtaaaaaggaagagagaaagaaagaaagaaagaaagaaagaaagaaagaaaaaaaatcagatagtgtatcaagaagtaagtgtctacattaagaatgacactgtcagacagaactagaaaaaaatcatcctgagtgaggtaacccaaaaccagaaagacaaatatagtatgtactcactcataagtggataccagacataaagcaaaagatacacagcctacaatccataaccccagagaatctagaaccctcttccagaaacagatggaagcagatacagaaatccacaactaaccattgaaccaagctcctggagtacaatcaaagtaaagaaggagcaaaaatatgaacaaaggagtcaagaacatgatagggaaacccacagaatcagtgggcctaagctagtgagagatcactgtctcaggtctgacaaatgaggaggctgcataagaccaaactagactccctttatataggggacaatggtatatacagggacaatatatgaggccactggcagtgggtccaaaatccaacactaatgcacaaattgacttagtagagcccattctatttagagagatagggtgtgtggggtagagaggtttcttggacctacctcaaggagatgatgggatgggacagacttaatagacttcctaatggaggccttaccctctctgaggaacagatgggagatggggaggagtggggggagtgagagaagaggagggagggggaactgggattggaatgcaaaaaaaaatttaaaaagaatggcactgtcaaacatactgatatattatccttagttccgataacaactgtatttggtgagagtcagagcatacaattagcaggttagtacttttaaaagtcaagattgtaaatacttatgaaaattaagacgaagggctctcttcttctattatgccacctgatgcaaataaataataagattccaactgggttattgaaaacatcttcagtaactcaggagacttcttcaaagatctttacctgcttataattatgctttgaagaaatccaaaaaagcacatagaaaaatactaacgaaaagccttctggaccaccaaggtttaccaggaactgtttgactcctatgagaatatatgataaagtaaatataaccagggattcctcatcacacagcattatcaatttcctcacaagtggttcctactggcacactcatagatcatgagccctgctttgaggtatcctcactgagttagattccaggatgtggtcctctgttttaagttctaatagattagttcattttctccattcaactgtcttctgaaactaaactgtgatcactgtggtaaggtttcttctatctcacctcttggtgtagctcccatgatgacctacccttctactcacacttggcatcatgtgccatctacacagggtatgctaggatttaaaggacaggcacagtcagctaccaagcatccttccctaataagcaagatggtgagaaaggataaggaacatagatagtgctaagccacaaagctaaatatccccagaatcggaatagtgttttggatggtatggcagcccagagtctataatcacagtgctgggaggctgaagcagctacactgtaagttcaagaccatcctgggttacatgctgagaccctatcccagaaaaaaggaaaaaaaaaaggcagaaaaatctagaaccttggccatctgatccatgtggatctatgaacacagcatgactgtgaaggtcactgtcatgcagtcccagagccttctaaaggaagcttatgcttattgcagcccaacacccacactatgtcctacgcagagtgtattacacattattctctgaaatccatcattcttccacaaccttgtgcctgcctagtcactgtctcacacaccttcatttctctcttctgcttttcacttcctctttttcagcaaaatttcatccttatttaggacaaggatcacttctgtcttttgtcccccaaagattagcagtgtgttagaaagactctgagctctggtgctagaaaaatgtggattaccatcctaatcttctcactggtcaactgcaagaccttagaatgaattccatcacacctttgagcttcatctttcttctctgcaccagacacatattaagctatgaaaaagtcatctgagctactaagtcctgagacccacctatgagccagattaaaatgctgtttacacatttaataaagaactatttttcaagcaggtatggtagcacacacctattattcctaaacttggaagactaaggcagaagtattgccctgaatacaaggccaacctgggctaccaagggaatgcaaggccagcctagatgatataatgagacctgtctcaaaataaacctatatatgagggctggagagatagctcaatgtttaagagcactggctgttcttccagaggtcctgagttcaattcccagcaatcacatggtggctcacaaccatctataatgaaatctggtgcccacttctggcctgtagtcatacatgcaggtagaatactatatacatgataaataaataaataaataaaactatatatacaaaacaagattttagatctttaaattatataaaaactcataagactttagcttacattctcatgcattgtactatcttctttactggaaaaagtcataataaaatgtttaaaatacatggtgaaagccactctgacaaagaccttatttcacagatttcttaaaactatttcttgataagatagtcaatctcaaaataggtaactctagttaaaatataagcagtctacccattctatctgcattatcaatcaaatgtgtgacaatggccgtccagatgaaatcatactaacatttatcacaaaaggaaaaaaaatgtcttccaagaaattccttctgactcatctgggtgagcctggtgttgccttcccctcagccttctaactgctaataagtaggtgatttgctggtggtgcaggcaacattccaagctgattattgggtcacatgagcagaaaaggcaccccctgttcatgaaacaattatgttaatcctttaattttttcagagcttatgcttataaaatattctaatcctccaagaatataggtttgggttgcagctggtgtttgcatattacttgttgagctcactaacattttcaaatcttacatattcattcccacaaccccaagaagagcaaaatagaggattattacttccatattaaagaggcaaacaaaagctaatcaagcaatgtgaggtatatatgaggtcaaacagccggttaaggccagatagggcttgaattttgattttctgaaccagcactatttgcaatgactctaagcaaatacagttcctaacattaaaggaattcctcttcttccctggatagtcttaacttcctttggtttctttcaaatttaacctaagattagatctcagttgtgcctgtacaaacacaagggttgttaattttcctaagtagaatgataaacggagtcagtgtttgaatgactggaaaaaatgatcaaaacattttgaggcatgatgtgtgtggacataaagactttcttatgtcatgacctagagacatgataacatatcttgcatctacccataaagaatcacatgaaagtttgttctactcaagtgagaatcttaagcagaagtgggtcagtgtgattgcctaagcagcaacagaccatagactggagcttacagttccaatgagtttttcattgactacaaaccagactgtaaaacttacttctacgtcatattttggcacagttatttgaatttcaagtgcagacagagcaaagagtaagggttgattatctgcataaatgaaaatatggatgaggggtgttgtgaacatgtgacctcaaaattgggagacaaactaatagctgactctgtacttctaaatatgcaaggaatatccatgtagatgagtcgatgggaaccagagcagatgcttgaatgttattatagtatgagtgtctgtggaagtgtgagatattttgctcctcacttgggtaatatctactgtgatcagacatcaacaaccaccctgcttatcccattcacacaataatttatccaaactagaaatggttgtaaatgacaaagttgctactcagcatgcacatgtaaaacaaaaaggcatagatgtgatggcccaggccttcttcccagaactctggaaacagggatagatggatctctgtgagttcatggccatcctggtgtgcataatgagttccacactaccagagctacattgtgagacccccaactctgataataataaatattattaaggtagactgttttaaagacacaatagtcagttgctcattctgtcgcttacagcttgctgctgtctcagatagaatagattcatgcttaggtttctaagctaagtcagaaactctccaccttcccccatgatcccaagaccttccatcctgtcactctatccactctaccagtcgtggtctcttatttctttctctaaaagaaacagaaactgggtgaagataaattaaccactgttattgatctcaaaacatgacttcttttattctagatgtcaaatataaacttcaatgagattaaaaatagaactcagaaatgactgaactgaaaggaagtaagaacattcaaaagcattccccttcaaaactctgccttttgatgtggttagaataaaaaaaaaaaagtactgtaccttccacaaagcacttgaataccccatgacaaaaatattataatataatcctataattttaatttcttcatcacttattagatacttcagccttatatgaacaatgggtcttggagccaaatgtaatttttatgcatatgtgaagctgagaaatgcaagaattctgatcccaagttattgggagaaagtttcagactgagcaacagcaaggaagagcaaccttttgaccaaaggtacaaccttctcttcttgccctgtggtcacatgctggcctctgactgcctcagcggccccaactatgtcattatatttctattgtgaaacacagtggaaccagctacaaaactttgtgcttattcccaggaaagcgcaacacgggaacattttaatttagatgttagttatttcaaaactgaagagcagcagtgtcctgatttaagataaatctaatgatatatgttgatattgaaacagaataaagtttcattttgccaaagggaagacctttgtagacttggatgtaaattcagttttgcaatttgtattacttttcaagctcattacaatttaaatttttaaagtatttcttacttatgagaactgtaatattgggataattgccatccatttaaaagtagtaaacaaagattcaaaatgtctcatcatggggtggagtccttaaactcctctattaagaaacttcatattttaagagaattacttggcaaatatgtttgtaagttaaattggtttaataatataggatttttctataaatttatttagagtaagttaattttctatgaaaaaaacagtttatataaccaaaaaccatcaaacatgagtatatataataaaaatttgaatatattctaggattataaaattagagtaatttttagtaaatagtttcacaaacattaccataacacacacacacacacacacacacacacacacaaaatgctgttattttctaatgagttgaaatcttctaattgaacacataaagaggaagatttagctcatggaaggctgaatctaaaagtgccaaaatgaaagataaaactaattccaagcccagcttcagtctttgctcatgcaatttcattattaaacattaaggcaagatttttttttttgcttgcttgttttgttttgctatctttaatcagattgatggttttatataaccttgtacttacaggccatatataaaagtgtaataagaaataaaacagttggtgagaaattaaatgcctatcttaaaaatttaagagtgtaacatctgaaccaaatttaaacatcaagattgtttggagggccactgtgagccagttagagggattgtactgcctcagtgatctcagagtactttccccaaagcaagttcctcttctaagttatcagtgatacaaggagtgatgactttgagatgccaattaatataaattgggagcagaagagatattaattaaacgtgacactctgattatttaaaccttctatttaagttgatcattcagagcacggtgatggcttgttcttcaaaaatgatggatggcatcaagctttagtgactccctctatatctgtggtttccaacacttcagaacagaaggaacaaatgatgtgagaagaacatgagaacaagtctaatagacagactgactaatctcagacccccaaggtcaaaccaaagcaatctgtttcttagctttcatcaacacaagacatgatttatcaatcgatgaacagtgtttcaaacattatacatctaaatgatatgttctttgtactgtgtaactttttgaacaaagatagattgtgtgatatattccctacaaaagtaatgtcatgagcaaaactcattatatttcccaaaacacattaaaaaaaaaccctgaatatgtcatctgtcattattactccacatgccatttggggagattatatttccaaactagattccttggaattctgtgcccttcatagtacaaatattacacactaacatccctgaaaatagtcctcttattctaatacatttatttgtgaagttggttgatgatttaaatttatatttaaatctatagataattattaaagacaatgttaaaaaaaagtatttcttgtgttgttataaaatttagtggagtttgatagatggctcagttggtaaagtgcctgccacacaagcctgaggagctgagttcagatccccagcatctgtataaaattcttgtgtggtggtgtttgtaattgcaatgctgacaaggtagagagctcactagccaggaagtctagccaattggtgagctcccaggttcagtgagagacctgtctcaaggatgagatggactagggaaggttgagagggattagggaagacattcaacagggatctctggtctccgtatgcatgcatacacacaggtgcatacacaccagcactaatatttatagaggaggaagtatggttaaagaaaaaaggtcatgagaaaatttcttaactataacataatgtaaatgcaagcatagatattattgtcaggctgttctctcccttgttacagcacctaagaactattttatgaggcatgcctatgatagttcagaaatgagttcatagtgtcatgttaggtaatctaggagatgcctcaaaatgagattacatgagaagagtagttggttgatgtcatgaaatttcactcttcattccacctccgtaaaatcgcatggctattttcactggcttaaattaattaccaccttctttccattagtttgggaaagatctgattgctcatatgaaggaggcagtaaaagggttatacccttggctgatgattcatcgcaccagctgccagcgagttgcatgtctcggcacacctggatacatgcaccagtgactgattaggaaacacatttatcttggtgcatcacaaaggagacacaactgtaattactctcccctgtaatgaaacgcattctggaacctgtgtccacctacaaaataatagaaagtacgcttttggacccgatccatgtaattgtgccatctgttcttgatacttagctctaaatatttcccaaatcactcttgtgttctaaaaataaaatgcagtttgaaaagacctacgttaactgttaaaatggtcagaagatatcaatttaaaacctaacactaatgaaaatgatcaaaactcagagtttctttggttgataaatacagaacatgacattaaccttcactgtgtacttaggaaattctgtggatttatcatgttttaatttggagaaaatgaatatattggctaagtttttcagagccctctaaatgagaactgacttaagtgtcccatgtgaaagaagaaaaaggaatcaaagcttttgttcttcaacttgtctcattataatgacctcaaaattctggagactcttaacctatactgagaaatcccatatattaagaccttaaagtaggatgttgtattaggggactagagagatttcatagcagttaatagcatgttgggttacatctaattgagttgttgaccaaaggggtcctatgggaatccccaagcaaaccaggttgttgccaagatataggttgctctccacactgacagcaagcccattgctgaagataacacctacacaattaatcgaacatgaagaggttaagccagtgcctacacagagccttcacccctacattacagcatccttaagacaggaaggtactctacacactgtcaaaagagaaacaaaaacatcaacctactcacaaaccctttatctacagtggtgtattgactgcaggatacatgagggcaatggtcacacaaagcttgtgggaggaaacatctaatttaacctaaggcccactccacaagatggaacccacacccaactactttggtgaccaagaacctgagggtagatagtccaggaatctagagtaaaaccaaataaaaatcaaaatgtactgataaaatgacttctattgatattctgctatcctcataaatcagtgtgccttgctcagtcatcatcagtgaagcttccgcctgcaacagaaacagagacccagagccagacatttcatataaagtgagagaccttggaacactcagccctagatgggatgtcttcatcaaattcctccattcagagctcagggaacacaatggaagaggagttagaatgagtgtatcagccagagggaatggaagacactaagaaaacaaggccctctaaatcaacgtgatcaaagctgatatggactcacagagactcaggcagcatgcacagggcctgcacaggtctgcacaaagtcctttacgtatatattatggcttccagtttagcattttgatgagattcctgactgtgtgaacaaagtgggtctgactctggtgacttctattttctgtctattggtttctcttgtccaattttgatgtgatagttttttattttatcttatttactttattctgttatatgtaaaagtgaatgaatgaatgaatgaatgaatgaatgaatgaatgaaaaacaagccactagggtaaaggttaacaactgaactggtgatgatacctgctgggagagcgcaaatcagttttctcaaatagagtgatagtaagtatatcaagcactccaggataggtctgatgttcaggagtagctgatcgaatgccattgttttgtgtgtgtgtgtgcttttattttgttacagttggggggggggggtcgtcagggggaactggctttattttgttttcttggttttgaggggttttgttgttatattggggttttgtttcttttcttttttgtttctttttgtcttatttatttatttatttattgcttttattttgagacagggtttctctgtattgcttttgagcctgccctggaactcgctctgtagaccaggctggcctcaaacttgaagagatccgcctgcctctacctcccaagtgctgggattaaaggtgtatgccaccaacgcccagcggttttgtttctttttaaggaagaacttaaatttcggtgggtagggaggaagaaaggatatgaagggactttgaggagaggaaaaatatgatcaaaatatgtttaaattttaaaatgcttctaaataacaaaaaatttaatttaaagaaagcatgtttttccaaaggatccaatttccaatactagcacccaagtcaggaggctctcaactacctataactcaaggggatctaacacattggcctctgcagacacctgcactcatgtacacacatacacacacacacacacacacacacacacacacacacacacacacacacacacacgcacacacacacggacacacacacacacaaagttttaaacaataaaataaaaatctcaaaaattagatattgaattaggtgttctatataagtttagtgaagaatgtatcaaaatcaacacttccagaaattgaaagtattcgatccaatattttaaaattctagtattacttaggatcctgtgagcttcatgattgaaactatagacattcatgtccctcaaaactctaatttttattgtaatacatatgcaataatgtaataatattctaagactgtttcataattgcttttaaagatttattttttctatgtgtatgtgtctatgtgtgttcgtgcataccactggtgtgtaggtgctgaaagaaactaagggtgcttggagttacaggtggttgtgagctgtctggtgtgggtgttgggaaactcactcacatcctctggaagagcaacaagtaaccttaactgttgagccatctctccagaaccaagtgagtttttatttattataaaagttgtattttgtttttttccattataagtagccttactccctatcaatataaaacctcaatgaattctctgcacacaaataagactaatcatgaaacaaatattcaactccagccctgaaaattgcaggagctggattcaatatgatgtggtgatttttcatactcatttcaaaaatgactgagaaaacaaacttgcttgggatgctgaaacctagaaaaacactcttaaatgagtaacggtttaccttgctctaaagtaaggatacaacaataatggtagcaacaatcaattatgtggagattaaaaaataatcatcactaatctaaatatatgtgctaactccttagcacaccaataaggcatatactattattattttcacttttcagatttatctttgaagactatgtgtgtgtttgcatctctgtgtggtggtatgtgtacatgggtacaggtgcctatgaaagccaaaagcacaggatcccttggatttggagtcagagacagttgtaagcaagtgatgtgggtgctgggaattgaactccagtcctctgcaactccattttcatttctttttctttttagttaagaaaaaaaatctctttctgggtggtggtggcacacgcctttcatcacagcactgcagaggcagaggtaaaggcaggaggatatctgtgaattggaggccagcctggtctacagagttccaggacaggctccaaagctacacagagaaaccctgtctgaaaaaaagaaaattcttttcagtgaaaaaattcactgaatcaacatatcacagtcactgttccttagtgtttataaacactgaagcatgggcttagtctgtgtctgaaactaagagatgaaataccattaaggaacagacttcttcaaccaagagccattccagggccatgtgtcagaaacatgtaacagcggtatgaaacacttaaagacagacacacatacatatgcacacaatagcagcatgtatctagcaaacacatctgtctaaactgttaaacaactccacctagaacagtgcttctacagcactgatattgtgatctagaacatgtccataaaccattacttactatttttcataataaatattcttttacattgcatttagcaatcagtgtctttaaaatatttcagctttaaatgcgatacttagccttagtcactcatttcccaaaatcagaattcaatcaatgtttaacataacatatagtataaaatgccctttctctgggtcaccgcaccacactaaggagtctacaaaactaaaatcacagttccacctatttatttctattatcagtgtggttacagccactaggtagtttgcttatcatttccaagaaatgtaagaattgcttccttgtaaacattccctttctctttaatttcaatgacaaatatgaaaacattcttataaattgaccatatttcttaataaattggtcttcttcatgttgaaattacacattgatttacagaacagtttaatcagatactatgaggcaccacgttaactcccattgttgactcttatgttctaaactctgatatctctgatatttggccaaatgcaatcagctaaccatctccaaagacacccggggccataatttgatagttcatcttactttcaacagtcagcccttaggcacactctctgattccaacctgtttcacaatgatgtactttctcacttcaatacttctgctttttcccacaggtaaagttctctctctctctctctctctctctctctctctctctctctctctctctttctctttttctccgcttcctgcactcttgatgagcaacatgtcctaggataaagttaagaacatcccattttctctttggtagataacactctgctgtggtgtcagtcacactattaagcttttgtttccatacttccattcagggaaaacacaataaaatggttgcagataagactcattcatcctgaaagaggtgcttacacaatagttagaagatagcctatgctgaataaaggcaaaatgagttaaatatcattatattttatatttcttaaattttccttctttaattgatatttattttttctatgtaaagtcaaaattttattcaaaaatcatgaaaataattaattttgcagcctattttgacccattgtttaactaacatcaaatctcctatcaatattttaatgaagaaaatgttaaaaaaattaactgagctcccaaatttacaagtttctataacatctttcatttacttcaccaagtttccattcattatactattctctctaattgcatagtttttttaaggtacatgtggaaataattaacttttttagttcaaactacacttataaagagtctgtgttaggttatatgtatatatgtaaaataggttatataaaacatatcattattctttcctatgttgagactgtaaggcaatttaggattaaatatagcacatgattatatataatatatctaatatatattagtatataatatatatttgtggggggtcatttatagtgaaaatttaggtgggtttatctaacagaacaatgatagcaacaacagtgaaattaactggcacacactgggtttcctcttcaagcctattattcaattagaaagttcaaattttattttaacgaaaatctcacaggaaatgaggttacttacttttcaggattttctacttcttcagtaataaagttgaggtaaaacctgtaatttaaattaaaaaaaaataactattagtatgttttaccaccacatgttaaacattttaaaatcaaactaagaatcgtgaaaattacataaaagtgcatgcagggagatgtaaataggaaaccagtaagaacttcaatagcacattttctactaaatcgtagtgggggcattaaaatgtgtcagacacaatggcgaggagagtggaaaccgcataatctgtatgccaagctcacagtttacaggacagctcagaacaacaggatgcaatgccagcaaagggcacagaagctagaagagtagaggcagccccaaactaaggtgggggaagcatttccagaggaagttccccccaacctggaccttcaagaacgcacagcatttcccatattgagctgccattccaggctgaggttggtccagagcacagaggtgtgaaacaatggttatatacagggaaagaaggaatgctatagtattctgccagtgggaaagaaagtatggaaggagaaattaagttgaaggtggcctgagtttcctgtaactctaaatttagagttagaaacaggaaaatccaaattatatgagatcaaccttgtagggaactgctatcgatttcctacacagaacacactgcataaacagggaccaaaacttgtaggaatgataatttattatatatctcaaattttcaagaagataaagtttcaaatgttttgccacaaaaataaaaactatactttgttatggaatgttaattactttggtttaattatttcatgttgcattcataaatcataacctcatatttttacctcagaaatgtatacgatttgccaatttataatttcaaactaaaataaaagtattaaaccttccattcacacttcttcttcaaattcactgccagtgtttaccctttataacctgattcacaagcctacagggaaggaggtctcgggtatgttcaggtagttaactgtaagcacattgttacttactacactgtccatcaagaacaaaaaagcagggaattttgaacacttctcaagtccataatacttttctggaaatcatacgtgaaaagaagcattttaggcagaaagtatttcactttcaatgccaacgggatctcatattcttaccctaatgtcagggcctgagaaattcttattgctttcttcacagtgagctactaccaagcccatacagacatggctaatgcctttcatcctggacttcattttccaactaaaaggggctgctggaggccctttaagccccatgaagttcttcttaagtatcctcaaagaaaggttgaagaaaattaagatttctcatgagaacaactgaacatagtaacaagaactacctatatcttcattccataaactcagggaactctcccagagtgaaaccctaaccctaaccctaaccctaaccctaaccctaaccctaaccctaaccctaaccctaaaccctaaaccctaaaccctaaccctaaaccctaaccttaaccctaacccttctacagttatcttattgttccttagacgctaaaataacctaaaatggcacatggaatcataggtctgaaagtcaaattgtcttctctctaaatacaaatatccagaatattagcccatcgcctgccacatgcttcaatcatctcacaccctagaagaaaggagaggaagctggtcctaactgaattcactagtcagttgatgttcaagaagaagatggctacagctttaataactaagttataaatcaatattagaaattcattgactgaaaatatggtagcaataagggtgatataaaaagtgtacacacatacatataaaactggtgatacattttaacaaccaaaaagttaaatttctaaaaacagcagttgttgttgccctagaaaggtgcacatatagcagactgcatataatgttgttattataggaaaagcaacagtcattgtgacccttgctatgtgcacaccccatctttcaccatataatgcaagctggaagaattgaaagtgtggactataaatgagctactattcttgcattaaatgtaccagagacagtgctgtggaatgtgctatttgagacagatttgacatgttcgttataagcctgaggcaacaggaagtatggggaacaaataaaaataagtaagcaaatacattaataacacccaaaactgaataaatcacgtgaattaaggaatagtgcttggttttgcatgtcagagatagccagttgctttttaatagttgatgaactggtctttctcaacaaccttaaggcaaggagaggactatttctgaaaaagaatgcaacttcaaatatttttttcttagagaatagagaaaaagaaagtgcttggggacaattttgggggggagaggacagcagatcatttcaaagccaaagtccatgcactgtgggaaataaactgggacagttgtctggtctcagtatggaatgaaggccacagtggtccctttcccctggtttacttctgaaggcccctggagaacactcacaaggtgtattgtcccagattttctatgactgtgcagaaaatgctatggttggccctgcattgtagcacccaaccttgtacatgacttttgaaggaagcagattctttaggtgagatttgacacaaaggcatacaataatctttgctggtgcttcagggagactaaatccattgaggatccgattaaagagggcgacaaaagacactgaaaaccaattttctatcacacagtgaaaaaagagaaaaaaaaaaaaagtctcaccacactgtgcttagctctggacctagatacaggattgaaattggttgacttccccaaggccaccagaggactggcagatgtatttctctgaatacggacattggcaataatatgaaagttgttctgacctgactccgtgacctgactgagttaatgatttctttccccctaatcatgtttcagtgaaggagttttcatcattctggataggttctgtgctcctcggagccaaaactttactccattcaggatccccaggggttgctggtatcttcttcctattcagcctaacagctggaggtgactgctcttagagtaaggtatccaggacaacagagggctagcatgcttcccatccaaacaggtagcagcctggcttgcaattcctgaccataactgctttgtttctgtctcattacaatgtctccacattgggtttatttcttccttttctttccccacttaaataaacattattctacagcaatgcagggaatggtagccatttacagtcccaatttacaagtgtgcaagccagttttgcactcacaaggtaaaagatggaggattcagatagcaaaggtttttcttacaatgctcccatctttgagacccatttcagactccaccttgatacatttacatggaaatatctacatctatggagtactgagcccaaagattctttcttgtacttgtgcttttttttctaagaccgagggccatagattcataaccagatcattcctcctctttccaaagcagcattaagccagcataataacccatgaagcaaaatagttccctatcattccccagctaagccacttggatcagataacatctcatttacaatcctagacttactttccaatagtgtgactgaaccctcaaacacacatacacacacacacacacacacaaaaaaaaaaaaaaatgaaattatggttcctggctcttcaagctagggttaagacacaaggattactgggggggggcagagggcggggagtatatatcaagttttcggtaaacctcctttagaggtgaaaacagtggcacttcggactcagcatcagtaaaatacaatattaataagataagtcaagatgaagagagtctttttccacaaaaaattccagcactcctcaaaaccctcagaagtggagaaaattggctgtacatgaagcaggtgacctgaatattcagtgccgggtggtggtggagagagggtagaaatgctttaatattccgtgggaacagatgcatggtgctcccaggcaaaagaaactccattcaacagaattaatcaaatctgccttgtgaagatcaccacattccacattcttgacagagtacaacaggctcccagcacccagctggagctgaaagctcttgttccctcccctgatttgctctggggctcccagggaccctcactgtggcttggctgctgccccagggcatggcgccctgattcaggctcaaaagacatagaggagttgattctgctcctaacactgtgatcacactcagttcttttctctgcttagcaccacattgtgctttgaacaaaagtgaaaagacttcaaaaccattgagattcaaaactaaagcgtgcacacaatggctgcaagaaaatcttcttcgggtatacaaatattttacactgatcttcttatgctataacccaacagccttcaaacacattttgcttcaaagctatgctaaacccatgtagctacactctgctgattctcttctaatgccatattttcacaatttgtgagattaatagggtacatattctattgattttggaatgcatttgtatattccctaaaagataagatccaaaaacataaacaaaaaagaaggaataaagaagagaaaaattgtattcatgttatatacatattcacattcacataattgttgagatactgaagtttctagatagtatttttaggagtattgtcacagctttaactattggttttataaatatggaaaaagaactattaccattatttactccaaaacaatgaaaattaatcgtcctgcaatgattttagtgtttcaacaatatcgtttcacctagtgggctctcttgaaatagtcatttcaacttagaaggtcaatacaatttagttacaggaagttcctctctaatatttgattactgtgactcatgctcctcaacaaaacagtgctgcgccagggcagggaggaatcacaggcagacaagcatgaaggaaataaacgcatccatggcatcgtggtgccaatcacatttgctgcctgtttgtgttttcagctactggaagcatttagatgaaatatgtaaaggcccgtgaatatgctgtatactatttgatttttattactttgatttctcctatcctgtctttatcatacgaaccattttgatctcctgagaccatctcatttctacatctaaattgtttcttcctcataacagggtagacaaaaagtcattaaccactatttataaatatccatggtactctagcacaaaggccttttgacagggagggtactaatccaagtatcccatggcactatttcatcctaactgatgaataattagaagtaatgtatactgactgttgaaaaccagcatctgtttgtttgtttatttttatgccactgagctgaatctaataacaaccctgactcatcagggactcctaactgtataagtttgaagctttgccacactgcaggaaactggaaggacctctgaagaaggatcagtttcaagtatcctcccaccttcccttcatgcttctctttctcccagggtaagctgcagaagataatcagtcttacctaagtgttcccagaaactagaacctatctcccacaaaggcaactgtaaaacctagaaatatgtctcacacttcctcctgcctttctgtggaaagcagctgcactgttctatgctccactttgtctcataatacatcgtaagagccttggttgagagaggttctattctctcccagggggaagaaatgttacacaaaaaagtcaagaagaatctgaaccaacacgtcacttagtttccctccagtctattaccattgcactatatcttttggccatgaaaattacttttcctggctttataggtcttcatttctgagaattccatgttacttgaaactttgactaaataatcactgtgtacctgacataatgaaaatctagttggggaagaaatgtgtgatgtgcttcctcatccgttactagggtcaaagctgacactcctatgataaaagacagattaacaagagaaaaggcaaatgaagcaatttaatgaagtatctggagatatccacttaccaaccagcatatgcatacatcccataataaaaagccaagggcaaccccattagatttgcatctcttcctgaaaatgcatcttcaaagtgctgtgtatgacctgcaattaggatgcaaggatttttagagctttgcaaagaattttctattatttgttccaaccctgacatggttgggaggtgagctgccctgttctgactctctgttcacagccaactctattgatactgcaaccacgctagggcaggagtctcaaatgcacacttgttgtcacctagaccattttaaagttcttttgtagatgacgagcaggatgaaagtggcacttaaaataggtgatatcatttccattgtttgagtgtcctctattttaaccaggatagtagactaaagcttctcctattaattgaagttttaagtttgtcaaaattcttagaagataatgaatggcatagtagggatgaaaagaaatctcagagtctgccttgactgaggaggcatcaagaaatgcttgtcctgcctcccacatcacatcacttaacaccctgctgtttatccctggagtacattggacacctgcctcctaaagcagggaaggctgcagacaaaactcactgtcaaaacccaaaaggcttgttcatataaaggttcatatcaaggttcccatgcccactctttgtagaggtaacttattgacactgtattggcccatcccaccattttcttctaaaaatatgaataagaaattgtaccaaacctcaaaccaagttttaccaacgttggcatcaacatgcagactgaacacttttgtccatcacaccccctccccctctatgttgtggagagcgggtatcttttcctttgaatcttttgggtagattacaaaaccagatttgtgttagtaagcacagattcaaaactaaccaaaaaattatctgtgtcatccaccacccccaaggaaaacagcaaatgagattactcaaataggaaaggaacatgttttaaaactgacctttagttcaataaaagggggccaagaagagaaaaggaagaggatgtatatacaacactctcttttaagtcaaatatcagctattgcccacatcatgagaccaagtattcatagtgatagaatatgaggatgggagccaagatggacatggttgtgttacataaagaacaatatttttttctcaaagcaatcaacttctaaatatagttttatgaaaacttgacaaggtgaatcaaaaatgcccattttcctgaaacatttctatgccttaatagaaggaaattatgcacactgagatctgttgggacttgagaggatgctctgcacctaaaaacagaggatctgagttcagctcccagcatccatacaaaccatgtgttgctccagcttcagggtatctgatgccctcttcttgcctttgtaagcacctgtgcttatgtgcacatcatcatttgcaggcatacaaatgtgtgtgcgcgcacacacacacacacacacacacacacacacacacacaaacatgtacacacacaaacacacatctaaaaataaaatattgtttaaaagaaaaaaaacacctatcgagtgttcttctatgatctgtggtctccttagcctaaaaagaaaatatcctttagagtgtagcaattagtaattaataagagaaaatatctaaactgtaaagactgggctacagttcttcaaatgagccactttgagagtgttgcaaagaggcacattgtttctgaacttcaggaacattttggatgcataacagaggccttaggaagatgaaagtaacattcaaagggaagttccaagcctcataagtaaatgcacaatatccagctacaattaggatctgattagagtagaattaaacacatcacacttattggtgaagtctttttcttcctggggtctcagagaaatgtggaaaaattaaatggttgtattacaaatttaaaatctcaattttataaaatttcatagtaataaagaaaatatgactggtctccaaagtactaaaaaatgctccaaatgcagtaatatcctcagggaatttctctgttgtgtgagaagcaagaattggggtgggtttatgttctggataccataagcaataattaaaatagcactgtattgtaactgacaagaaagattcaggagtttcaccatggtctctgttctcaagtaatttgtgatgcaatagcaactgctaaccatgctccattacatgctaaacatacatagatgaggggtcagaaccagctacagactataactacatatcatagccggcattataccaacaggaaaagccagaaaacagccaagtctagaagggctagggattcacccttccgttactttccagaatctcaaaggctctctacagaagactagaaagtcagctcaggagatgaaagctctgagagtgtgaacaattttgcctcctttcagagtggaatgtgagcaggccagctctgtggataccatggtgaattgggacagcaagcccacatcttctcatacaccagctctactgttcaaatggcacattgtgtttattcagagactgaagttttgggatttggtgaaagcattttactggcaggactctaagattgcccactaggctgattaaatggacaagaacagttccctctcccagatagagtaaccaagttctcagtgtttggtgcctctaccaatggcaagggttttcctgaacttcgtcacttccttgtgtattggaattctcctcctgtggagtcattaaatttctctataaattccttttcttggaactgacgatgtcaatgtaaacaatatatatttaccatgcccacatgatatatcagtttttaattgatttgctctaatcatttctcgttatttcctgttgcaaattcagtaaacccttggactctctgtctcttccagccatttccaccaaatctaagccaacacacattaccaggccaaccctaactctgtggtagcatccctcacattcttatcttattaaataggaagctccatgactgataaatccagaagcttccccattcagaaatacaaattttacagagaaaaatagtgtaacaattagagctaagttttttcaactcttttattgtcacataaggatcctgttttttggaatgttattcttaaaccccactgctcttctgtggggtaattgtctcagaataaggaaatgcaaatgagaaaataaagacttgttagtcattttccattattttcaagaactattttatcatatttgttgctattattgaaaagttctgcagtgcaaacaaaggatatattgatctgtacttaaagctatatagcaaattcattgtgtgtgtgtgtgtgtgtgtgtgtgtgtgtgtgtgtgtgtgtgtgtgtgtgtgtttgtgtgtgtgtggagtggtgaggtgtttttttctttttcactttgggttttgactcctagtaattttaatttataccaaaagaattcttagataccttatttttgttgcttggtctcctcttaattctcttgctgccattcgactataaatactaacttaccctcagtgtagcctttcaaatcaattagatgacagtacagagtttaagttccacaagcaaagactaattaaggattctgctagacaagcgaaagtcagtgttagaagagaccagaagcagatacgcagtttaaagcgcatttacttttcagtccatacctttaattagctgtataactccagggactataattatcaggattgctgtgagcttgcagaaggttaggaaaatctggatccgggcactccagctgacactcatgctattcaggaccatcaccacagctgtaaacaaacagacaaagttacaaaaggcaaacccccatgagcacaatgatgtcttaggtccttgtcagtcgaaatgtgatctataatcctgcagtgctggcatgaactaccaggaccaaagcagtgcagaatcccaggctcttccccagatctagtctctcccccattaagactgctctttgatatacattcaagcctgaaaagcttacataaagctcctgcacagtcagagagcctgttttgttctttgcacattggtaagaaatgaacatacattgctgtgcaataacaataaagtaaaatatcttcatcttgaagtcatctaatgggtcatgatagtgttggattaatcctgaagtcatctagtggatcatgatggtgctgcatttgactcaggaaagggtaagaagtgctgattctgaggtcttgttcttctccatcaggaccagccctactcagtgctcttcttggacttcctccctgctttccaaatagatgatgaagggtgagttttaactaccatgcaagtgtcagcttccaatgtgtgtttggctatttgatcaaataaaaatcttggacttttcaactcagtatgcatagtgggtctgaagccaggagacttccctcttcttactgatactgttgacagtttcccaagcagccacatcaaggacagaacaatggctgttcatttgggcattgcagttatcatctctattcctggctagggagataactaacatatttctgttgtgtgagtaaatgaatgggtgaagtaggttcttaaaaatgctaaggaacagttttaatggtgataatgtaggctttcattttcttatatggttattctacacagtgaatttcaactttatattcttgacaaaaacataggcacagtgtagctaaaagcaggtagcagctattacacacctatggttttcatcaataatctttctttttgtaaagatgtgttctccctaagcaaagattttaaaaatgtatctcagaaaattaaaaaaaaaaaccactagcaaaattcttaccattcaaattggaattgtgcaatcaggagttgtcaccatgtttcccttgtataatataatcattacttcagttccctaattaggaattgctgaagtataatcaatatacaataactaatgggaaaaattaaaacaatctatatccaaacagagcctaactaatgtacagtcttttaatggttttggacagccatctaaaatcaatatataatcaataatgtattacatgaaaaggtgtttatggcatgctactgacccacacagtaggttaaacagtcattaatgtgtgcatgaggagatgataaactcagagatagaggaaaacaggatgcctgaagaaatatttataaaataatatccagtatctaaaaagacagaacatcaaaatttttcaaatttgaaatttaggttacagcaacatttcaccacattttgtggaagattagaattttaatgacagcagtcagtgaatgaaccatgcacataaatgtgcttacaacccaaactaaagaggtattggggtgaggtgacagcaacaggagcaaactttcactaggaaacagttcacatggcataggcagattgtcaccacattacacatactaaaataatgcaattttattggcaaaatatatctcagtaaacgtagacattttaataagtaaataaagcagcaggtaaagtcttgctgagaaaaagacaaagatgagggatcagaagagtccactaaaagcgtaatggagcagtaacgaagtatgtcacagaaataatgatacaaatggtcagaaaggcccgagggggggggacacatcataattcagctatctttgaagctgactacatgaggaaataaacaggtcttctgtcagtgctcaaagacattgtttcatcaggaattatgaaaaataaagtaattttctgtctccaatacatagagaagttacgtatcagaaataatcagacacaaccctgcttctctccattttatcaaatgaatatgcatttctctatgcaaattcctatataattaatggatcatcacatgatgatgataatttttttaactaaagaggcccaactttgacaggaaagtggagaaaaaaaaaaaaaaaaaaaaaaaaattggccttgtgtcatcagcagcaagggagcactgtgtttgccctatctcaggtggtacaaagtagaagagaggccctgggagaaagagggaaataaagagacagacacactgggaaagaagaaatagtctcctttgaagaacacctgaccactgcatatttgagaagagagagtccgctgccttctaaatgctcgatgccccctggaacatggaaaacaatgaggatcggaatattattcctttttgtaaacttttctgagacaaatggaagacacaaatcaatcaaacaaacatcaggaattgatcctttcaccttgctttcttcctcttagctgaggaagaatgcttagtgagactgcattccctctcaaactcttctccaaagtcagctttatctgagcatctaatatcccctcattggtagaagctacaccacattccaggtgtgcctcagtgaccctggaatacagtctagtgactaacgaggctgcctatggggcagccagaagatgttctcaggctgctaaagctgctgcttcatcctgtgtctacacagaaggatttaaggctgcaaagtgtgctacttacccaacagtattgaatagcgatttgggattcagtaaacacaggcgtgttctgagtttctgacataaaccctagctgcttcttaaatgtgtaccatctacgcatacaaaagagtctgagccagcactctggtatgaggtttaacccctttgagtaacagttaatttcacacatgaggaaactgggggggggcttcaactttttagcaaaatgaaaattcagcaacacatggacttttatttacttatttattgcagtttcctagaaaccaatatgtagcaggaaaagctatatccataaatcctacagataagaaacccatttttgaaaggagttgtatttaaaagggatgtttagggaaatcttgaggactgatgctatctatgattcaaggactagcaagtatttctttctgcacactccatcatttacctctgtctttcattttgaaaaaaagttacagattattggattgtctctcagagtcatattccttcaggcttctgcctttagagcactttgtgctaaacccgtaaaacatacagatgctatatatgaatgctatatgatgagataaagtgggtgcctccactgtttcctgcagcagctgctgagtttctttatctcttagcatccatttccgagatgcactgatctcagaaagtacctttagaaggcagatggccaactctgtatctatgatctcactgttgggaataaacagagccaggaccgcaaaaatgtaaactattatcttatatcagacatagtgcagagacttccatggataacacttgttaatctgcacatttctatgacatggctgctattatcagtcatgtatttcatataagcgggtaaaactccaggctctgtttaatttgctggtgttcatatacaggcagtgcgtggtaagataagattagaaggtaggaaggcaaactcctgagctcaagccttcaccaccagctcacaggtgcagcaacgaggaaatagctcaaaagaaatgtgtgaactcactgatacaaccagttttttgacaaacttgtgacatctctttttcttagttctctgggagggttcgtgtctgtcttaggatctcagggcacttgaattccacattttatgtatcatccttctgaaggatatggctgctgttccttggtatatgtatatcttgctgcacataactacggaagagtcaactttattgtgctgtagtttagctactggagaaaaggagtaaggatacctaggcttcagatttaaagagatccacaaacacacactgtgattgaaatgccaacacaggctactcatatattttcaatataagttgaaggtgccagaaacacagaaatgacagtactgtatttgtagcactggctggtttgattttgtctttctctgtatgtacatgttttcctgtgtttgcgtgagtgtgggcaggtgtgcatgtgtgtatacacattaagaggccagggacagatgatgaccatctttctcagttgctgtcctctttatttctgagtgggatttctcattgaacccaaagatcactgatttatccctggaggtcgtccagttcctaattcttcagtcctagaattacaggctggggctgaaactcaggtcttcatgcccgctcagcagactctttacctactggatcatcttctcagctgctagctatgcttcacaatcatgtagaaatactgttttctttgtcgctcccagttacttccacaaggttcaagtgtacaacatggctctcgtctatataaagtaaaccatcaaaggttctgagactgagagagatgtgttagggtggatgtgagtacaacccacaacataaggagaaagcactgttatgataatattccacctgagaacatgcttctttagggtgcagctttaaggaccagagccatcggcttgatattttgtatactgaacacatatcctagttcctttgaactgtaagagaagtggaacttgtgatctttcataagtgatcatgtcagaattgaacttagggacataagctgaagtgaacttaaaagattttccattacacttcactgtgcctaacatttttgctaaaatggacaggattttggataaacacaagtgtctcatctttattatttgccagaagtggggtactttgaaaactgtgggtatattaggatttaataaatccctcccctgctctgctattatttttcaaatggttggttaatatttcacaaaagttgaaatgcttttgaagtttgacctttttctctacttaactagagatttagattcctcatttctctctaggaacttgggaggtaattcatgcaattaaactgcactttctacatttccacaaccttccccctgtaacaggcagaacatcacctatattcactttgaaaaataatttgagagatttgcccccaggtaaattactctttatctttgtcttcacccctgttgttccattaaagctaaattccttttaaaggcactttgacttttccaattaagcctttgacttaaattacgtcccactgattcatgagcatattctagttttctttcagtacctccgaggttaggaacttggttcctgatcagcatctgtagtttatgtcagaatttacaaactaatactgtagctactatcaaaaataagatgaaatatcgaggttccatcaatccttcaggctctaaccattcctccaccaaactcaactacaaatctgtgagcccacacacagccgcccgatcctttcttgaaattgttttaaatttggggggagatctgaaattttgaattctctaaaatataaatgtctgcatttaaaaagtttaaaattgggattaataagagtcattcaagccgggcagtggtggcacatgcctttaatgccagcactcaggagacagaaacaggcggatcactgtgagttcgagactagcctggtctacaagagctagttccaggacagcctccaaagccacagggaaaccctgtttcgaaaaaccaaaaaaaaaaaaaaaagtttgtggttctggcaagatggctccagtggaaataaaaatacaaacatcatcatttatttaatttcatagtcaaagcaagctgtgaatttttaactatctatacataaggatttgctttaagatcttggcttatgctttttagttaataacatgtgattttgtctcattcagggaaaaaggatatgacggatgtaaaaatgtctgctagtctaacccttcagtgtaacatcagaggcatcaagaactttccatgctagaggaactcttcaaagtcttaaatatcttacatttctatagccattcaacacacattgttatatcaaaggcattttatcaaccaacaaacagaagcataaataagtttaaaccaagatcaaataacaagaaaccaggacactttgtcccaactccagcttgttggtctctagtaattataaccattgtataagatgattcacctcacaaaagctcatggtgccagaacatcttgctagcagacggttgctctccactaatctccttgcttcctgagaactgaagcttcctaaaacttaagtttaacaggttacaaactacaagtatttctgctaggttttaaaagaaaacttccttagactttttctcataaagtcaatcagtaacagacagcttctgagcatgaacaagcaacctaagagctgctgggtgtctggggatgaagccttgtgcaggccccctggtcccagaggaattccagtggcatttctccacagaagtataaatattcatcacttgccctgcattcgtaataagttgcacgcatcatcacaaatactctacacacattgagtcctcatagcccccacaacactggcataattatctcatgacaatactgaggtgcagtgatgtaagttcaattgctcctaggtttcctgtctgtagtgtctataaatgaagaacttcataggcagctacatcttaattcccagaactccaaaatgtctacttttgagtcattttctttgtctttccagagacgtcacaaaacaactgtgtgtttaggattaagctgtttagttaagaaatccatgtatgtcgtaccagagatggttttacatagaatcactcacactctgtcacagaaaagtccttagggcatctgctgtcaaaagtgcattgagttttatgttattctattaagccactgtggagcaaccctctaagcagtcttcctggagtatacaattcagttattcctgtgtaccattctctgggttgtttaacttagtcaactatctatgatcgtaaggattcagcaaaacatgatttaaatagcaattattatccatttccatgatattctagaatgttatacaaaatgaccaccggatttggcttgttgtagaatattattttaaggtgtgttacatttgcttatgtgtggaacatttgttttgatgatacaaagatgtgttgtattcttttgtgctgcatttgtttaactatgtgaagctgtgattctttgcctgtcaaaaacacctaacggtctaataaagagccgaacggccaatagcaaggcaggagaaaggataagcagggctggcaggcagagaaaataaataggaggagatggagaaaaaaatggaggaaggaacaagagaacaagggaggagaatggcaggggccagaccccagccaggcccccagccagtcctctagccagccacagagtaagagtgaaagtaagataaacagaagtgtcagtgagctcccacttgctcaggtcagctgtctctgtgggtttccccatcatgatcttgaccctttgctcatataatcccttttccctctcatcagctggactctaggaggttggcccagtgcttagctgtggatctctgcatctacttccatcagtttctagacgaaggtgctatgatgacagttagtgtggtcatcagtttgatcacaagagaaggtcagttcaggcaccctctcaactattgctaggagtcttagctggggtcctccttgtggattcctgggagtttctctagcaacagaactctccctaactccataatggctccctctatggggatttctatttccttgctctttctatctctcctcaaactcaaccatctcattccctcatgttttcacaccccctcccattttactcagaagatcttatctatttccccttcccaggggcatccctgcatgtctctcttagggtcctggggaatctgtataggactgaactaggccttctgaatatggatgacagttctgtgacttgggctgtctgtggagccactggtggtaggaccaggatttatccctaaagtatgaactgacttttggagcccattccctagggagggataccttgcacagcctccatgcaggagggaggggcttgatcctgtctaaacttgatatgccatactttgttgacttcccatgggaggcctcacccttactaaggagtgagtggggggttgattgaggggaaggttggcatgggcaggaggaggggagggaggggaactgtggttggtatgaaaaatgaaaaaaaaaaaaacaaatgtaaaagaaaaaaagatacacagaagtaagaaaaggaaaaaggctggtggtagactgggatagtttaagttaagaaaagttgcctagaaacaagccaaggtaaggcttgtatgatttatgtagaaactgggtgttgggccccccaaagagaaaagagtaaaaaacaaacaacaattgcttatggaatcttgtatatgttcctcttttcattttatctgtttcttcaatttccaaatgtctatgccaattaataaaaaaataaacaacttcctaatttatagcccataaacaaatattccagctgagaaaggctactggttatcaaatcttgagagaaaattcttatcatgaccaaaaataggcagagaaaaatgataacagtgagggtgacagtcaatatcactataaacaatacaaacacaatatgcacacccaacatataaacatagcccaaggactactggtgagtaataatttcacatatcactggcatagggttatttctagtttaaaaagcaattcctcagaattcgtcatctgtgagactgtcttttgatccaccatccattcaatattttacccaggaaggagtctttgtctactttaaaagctcaggccccacacttgtgaaccctgtatacagttagcacacactgtaatagaagaggccacttcaaatcttctgttcttgcctctagtttcccacacagatttgaaaccataagcacagagaagacaatttgggaaatactatgtcccccccccaaaaaaatgctaaagaaaatttgcctctaatcacattgttacattacattcttcttttctgttatagctacaatactcactgatgcccacagctgttacgagcttgattgcaagttcaggaatttcacattgaataaaaaatggttccagaatgtatcgtccaaatgccagggatatcacagcggtagctccagggctaagaaataatgtattaaggttaacttcaggtaacactaagtaacagtttcactaaaactttttatctttaggtcttactacctgacaggtggaacctaactaacaaggaagtcttagaacttcatatttcattaagttgccatacattccaaatgaaatattgtctatataagtaatggctattttttaaaaaaaaatctctgtgaaaattagtactactaagagttcattgccaaaatgtgtctaaatatttaatgttgactcttaatttgctagtaaaaagaaatctctaagccacatgaatattcttaatttcttaagaatatttatataaagagaaccactaaataagaagacaaaaaatcccagcctgaggagaagaaaacccagacaataagtcatcccactttagttcttcaaaggaaaaaaagagtgtttcatttcatcttcaatatgagtgcatattgttgccacacacaaggaaacccacagaattgcttaacatctcatgagtctctttcagcttctcttcctccttgtggttacctaacacccaggcctcatccctggattaccagaaaccaaccaccatcacctgtctccagcctgggtctcctaccttcagtcaccaccacaaacattgtaactttcttctcttcctaaagaaccctttctcttttctccaaagaggatattcttgccattttctatcatttggtttgtaaaatgaagtctggtcgtgtggtttcggtacccttaaaccatgctttgacactccggtccaagcttctcctaattcttttgcctttctctcaggatcaagatctcaatcacttctgcccagagctttttcaaatagctgcttttgcttctgccatgaatggcacatgtagggcaacatcaaatagttactttttataccttgcatctgggttcagtcttggtccagagaagtgtcttcaaccctttgcctgagtctgtccaagtgttttcctacacagcaccacatttgtcccttccacactgcttatcacagcagtttttttattcttcttaaggtgattcccagattgaaactctctacttccacttgactttgaagtctatgagaacaagactgtgtctatcactaatcagaattttatcccagtgcactggctagcacagtatctgtcatacagtagaaattcaatagttattgaacatattatgaatgagtgaacttaactttgaagcccccatcatgttctgttgggtgactgtgtttgaattcattttgaaggttatttctggcaatacagacttattttgaaagtacacctttaaccttagagactgcatctattactatttagatgtcatgagtagtactaatagaaaagaaacatttatgtacttaggggatcatgtcctttttcatgtcatatgttattttgtgtgtttgaaagactactccaacagtgtgagtccagtatgacaaaaaggaatacaaatgtatttacaagtttctggaatttatttaggtaatttggctacacacatacactcacacacacacacacacacacacacacacacacactaaaatagttcttcctaaattaaggcaacatctgattatcagctgtttaggagcaggaattgtggttcattccaatttagatctctttatcttgcatttgccatttgcaacaatttgtggaaagaataagttaatgaatgggcaccatatctgtccactgcaaatggaatgatcacactcatagaaacactggtaattagataaagttacacaaccaatgaatggatgaagatggagtgaagtcgaaagacatcagtctgggtagctcaacagcctgacaggccagcattcaaagtgttcctatttcaatgctgagtttgttacattcaaaataagaattcatatccaggatatacagggtgctgatctaaatagtatgaaagttataaaaaggtgttaagacttgttttcatatacttgaaatgggaaaaatacaacacaggtagctaaagtattaaataaaagacatggtaataagttcaatgtcaaatgggatgtagaggctacttttgttttcccaaagaattaagacatgaaagaaagctgggcagtggtggcacacacctttaatcccagcactgggaggcagaggcaggtagatctctgtaagtttgaggtgagcctggtctacaaagctacacagagaaagcctgtcttgaaaagccagagagagagagagagagagagagagagagagagagagagannnnnnnnnnnnnnnnnnnnnnnnnnnnnnnnnnnnnnnnnnnnnnnnnnnnnnnnnnnnnnnnnnnnnnnnnnnnnnnnnnnnnnnnnnnnnnnnnnnnnnnnnnnnnnnnnnnnnnnnnnnnnnnnnnnnnnnnnnnnnnnnnnnnnnnnnnnnnnnnnnnnnnnnnnnnnnnnnnnnnnnnnnnnnnnnnnnnnnnnnnnnnnnnnnnnnnnnnnnnnnnnnnnnnnnnnnnnnnnnnnnnnnnnnnnnnnnnnnnnnnnnnnnnnnnnnnnnnnnnnnnnnnnnnnnnnnnnnnnnnnnnnnnnnnnnnnnnnnnnnnnnnnnnnnnnnnnnnnnnnnnnnnnnnnnnnnnnnnnnnnnnnnnnnnnnnnnnnnnnnnnnnnnnnnnnnnnnnnnnnnnnnnnnnnnnnnnnnnnnnnnnnnnnnnnnnnnnnnnnnnnnnnnnnnnnnnnnnnnnnnnnnnnnnnnnnnnnnnnnnnnnnnnnnnnnnnnnnnnnnnnnnnnnnnnnnnnnnnnnnnnnnnnnnnnnnnnnnnnnnnnnnnnnnnnnnnnnnnnnnnnnnnnnnnnnnnnnnnnnnnnnnnnnnnnnnnnnnnnnnnnnnnnnnnnnnnnnnnnnnnnnnnnnnnnnnnnnnnnnnnnnnnnnnnnnnnnnnnnnnnnnnnnnnnnnnnnnnnnnnnnnnnnnnnnnnnnnnnnnnnnnnnnnnnnnnnnnnnnnnnnnnnnnnnnnnnnnnnnnnnnnnnnnnnnnnnnnnnnnnnnnnnnnnnnnnnnnnnnnnnnnnnnnnnnnnnnnnnnnnnnnnnnnnnnnnnnnnnnnnnnnnnnnnnnnnnnnnnnnnnnnnnnnnnnnnnnnnnnnnnnnnnnnnnnnnnnnnnnnnnnnnnnnnnnnnnnnnnnnnnnnnnnnnnnnnnnnnnnnnnnnnnnnnnnnnnnnnnnnnnnnnnnnnnnnnnnnnnnnnnnnnnnnnnnnnnnnnnnnnnnnnnnnnnnnnnnnnnnnnnnnnnnnnnnnnnnnnnnnnnnnnnnnnnnnnnnnnnnnnnnnnnnnnnnnnnnnnnnnnnnnnnnnnnnnnnnnnnnnnnnnnnnnnnnnnnnnnnnnnnnnnnnnnnnnnnnnnnnnnnnnnnnnnnnnnnnnnnnnnnnnnnnnnnnnnnnnnnnnnnnnnnnnnnnnnnnnnnnnnnnnnnnnnnnnnnnnnnnnnnnnnnnnnnnnnnnnnnnnnnnnnnnnnnnnnnnnnnnnnnnnnnnnnnnnnnnnnnnnnnnnnnnnnnnnnnnnnnnnnnnnnnnnnnnnnnnnnnnnnnnnnnnnnnnnnnnnnnnnnnnnnnnnnnnnnnnnnnnnnnnnnnnnnnnnnnnnnnnnnnnnnnnnnnnnnnnnnnnnnnnnnnnnnnnnnnnnnnnnnnnnnnnnnnnnnaatggccttccttcttcatgacaacagtcatctcataactgagatttaccaagttcctcttttaacttccttacacttgagacctgcctaataagaaagaaaaaatgaagaaagaaaggaagaaagaaagaaagaaagaaagaaagaaagaaaggaaggaaggaaggaaggaaggaagaagaaagaaagaaagaaaaatacaagccaaggactggaaagatgactcagcagttaagagcactggctgctctccagaagacccaaactcgattctcagcttccatgtggtgactcacaaccatctgtatctctggttccaggtgatccagtgccctcctctggcctcctcgagcaccaggcatgtgcattgtgcatagacatgcgcacacaggaaaagtacccatatacataagaaccaaataaaatgaaatgaaaataaatgtaaggaaagaaattttgtttggaatggtatctacaaacatacttgagaatctgtggtcagaaaccagagggcagaggaaaaagacaaggcagcagatatcaaaggtcctgacctggcctttgaataacaataccatttcatgctaagacaagttatacgctcaaacttacctcacttcggcattttagtacattttaataaatattgtttctgtggcatatcaaaatatgggttatctgtcttggggaagaatggattacacatcttgtgagacgttagttaactggtagaatatgttttgtcagcaaaatgaatcgcgattcagttgttctgtggctagaaattgttattatggatgttttcaaaatgtacattaaggaagttgaaagaagagctgttttacaatgagattccatgtgtaccgtcatgtatgtaatgtaaaatcagttataaactaagttgtgtttagaagtaatattaagatgggattggggaagctatttaaactccccaaatggtacttttcaccccatttgaagtgaaagaaatgaactttcatctcgtaaaagacttgcatatataaaggtgataaagagtaggactgattctgacactgtaaacaccacatgacatgaatatactcacctactagttcatagttaatcatgatggacataaaaaaatacatttttatcaaaaaaagcctctgacattgctcagtgctcaaaggtaacaaagtttctgtccaaacaccacctgaggaggctccaagtgtggaatgtaattactgatcagtaatgtctcctgaagtctgagtacacttctctgattcccaaatccaggattatctcagagtcacttggagaatatttttttaagagtgaacaaaggaggaaagactctgggaacacaccctctactctgtcagagtccagacttcaccccaaagaacaatccaagcagctctgatgctatttaatgttaaacgagcttgcaggtagctagctgcaaaagaagtttggagtatttcattaatgtagaactaaaggtaactagttatagtgaacttcttttgaaaaagtaatcaccatgttggtaggttatccagaaaagcaacaatatgacctagttattaaaaagagtcttaagtaacttgcaatttactgtccgggaatcaatacccagccagacccctgtacactttgccccaggtttaaattgagttctgagagaatggaattttcatttaaaggtctcaagctccataactatgtacccagatgaaaagaagttcaaagctggctataaaagtccatatgttgaccttagaattcaaaaagttacaaatcaaatacaggtgctcctctccttacagactgtgactttgctcctctccaccccccccaaaaaaaaaacattcaaaacactagtcagtgagaatttcactgaccatacatagcctagggactgtcctgcacatttgccttgagttagacaaaagcaccctacaaaaagttcattttacaagtgttaaaatatgtcaagtaatttactgaataacaaattcttatcacccagcactggaaggttaaaacatcatgtgccaaaccaccttaaattggggactctgttggtccacattcttgacttacattccctgagttctagagcttcaagtaacagaagaatcttctccttgtatcttgcttgcttcctatttgtgaagactctgtgtccagaaagttcccagtaatttaggtggaaatattatgagggcacatgtctgaagttaacagctcaagcatccactgtggctcacatcacaccccctcagttgctctctgtaatttcctgagtttccaccaaagatggcagacttacatacaaacatatttcctccatacaagccagtgtgtctttaactagctcaaccaagtaatttattttagagcatctgaataaccattgattgtgtgtgaaaatcaaatcataccgtgggagctgcctgtatttaagtatttgaagtccaagaaactggttgtagtttttctgattagatattgatttattctaaatatatcaagtattgtaagacatttaaaacctgggagtacgctgtcacttaagatcaacaattgagcttctctttgcttatcagtacctgcatatgccagaaccactttaatattaacaatggtaaagattctactggaactttcaataactgcattactccaaacaatgaagagaactggaaaggggtaacacacagctgtcaccaaacatttcataaagcataatctagtcacataaatgatgtcaccaagttttccagattcaagtaatttctccatggatctttctataataagtgtgctttcaaaattacttgaaatgtctccatcctaaaaacagatatttaagttctctgggtaggtaactcttcccaaatagtgatttcaaatatcacaagacttaaacagaaagaatgagtggagcaagagttagagcacttggacccagagtagcttggtctcaggtaaatgaagtaactttaaagtgtggtctactttgggatcaaaggataaatccaatttaaaaaaaaatggatcattcaccagtttttgtcatctttacaatggacatgaagagttttatattgatttgccctcctgatcaaggatcaattatttcctcttcagtattaatcctcaaaccaatcagagaaacataaattctgaagagaaaaaataataaccatagtaaataccagttctggtcagaggaacttcagtgagaaatgatctgtttccccagagaccacgtaaatcacagatgatgaaaacagatccaggcatggagagaagactgacacccaagtgaagcctggaaactcatactgagaaacgttctcaaaggtgttacaaaacagaataataaggggagaaagtccaagtcattgcctttgtgccactcacagagcccgagtcacatcaaacacttgtctctccaaggacttatgaaagcatactattaggaacagagaagcctatgaattaaaaatattaaaaaaggcagagagtgccacccatttgttaagctaataaaatgtcagcgatactgctctgaacatccggttctgcatgtaaataggccatgcaggctgcacctcacaggtgtttcatccagcgcgccagctgccacgatgctctaggcatgcctcgcaaaacccaaaccctcagcagagaaggcttgtctggcttttgggggtcatcaaagttagtttttgctcttctcacaccagagaaaagtcagagaagagtccccggcaggaaaggagagtatagcctcaaggaaagactctgagagcattcggtctgatgccaacagtggaccgtgtgtttgggttgtgcacatacctgaacaacagcaacaaaacttcaaaacatttcctgtagtatttgtcattcatctactcctcagaaataaccctttgctttcccagagagccacacagccacacccccagagaagaagtgcactcaccaaaaagtgacagtactccacaggcagaccagaacaccagggacatgcccacgctgcctgtgttctggagtatgcccttgggggagatgaagatgcccgatccgatgacggtgccgatgatgatggagacccccctcagcaaagtgatcttctttttcagaaccactttctcctgcccaggtgcctcttggtcccccatggagggcagcctcccgctcacattgccctgcaggtaacctcctttcgagatggtggtcacaactggctttctgaccatggtagtgtcccaccaagcgaggggagtgaaaaagaaaacagggaaaaaacaaacaaacaactttcaactttggtttctctagacgtgactgatcactgttcagactcggctttctctttgctttcactgactggctctgcactattttgtccacaggtgaaaactctggggtgtgctttagccttagcagctatctaactactcctcttgctcctccggagcacctgtgtgccaccggctccaggcgcagtcagtttgcagcagccgcagctgctgccctatcattacacaccagctcagcttcctcgtgggctcgtatttatgctaccgcctgtcacaccaacttactgggctacaatgatgatgcaaattctccaggtttgcatcagccacatgagaaagctccaccttgggaaagcgccaacattactcagcttttttttttttttttttttttttttttttttttttttttttacagtagtgggcgtgttgctcaactgacccaaagcatttccctgaacaaagcgtacaattaaagaggggcttaaccaatccaaaagaagtaaaacaggaacagatattgtcgtcgtggtgactgtaagcaactcagctctcagagagaaagaaaatggaaaatgaaacaggaaacgattatttcattttaaggagttgcttcttaactttaacatgtgcataaaatgttgtatgcacaactgttttgagaatagaaaagtgccttagggctgcattgttttcaacagcaaagtttagactttataatttgtattctacttacttccccgggtgtttcctagcaacactgtcaaatctaatatttacaaagctagaaagtttctgcacactagagccgaggctactgcacagctccacatgaacgggagtaattgtttcttaagacctgtaatatgctgtgtttaagatcgccatctgcgtttgagaagttcaaagatcccagtgactggagaaaatagtccttttctgattcttgtcagctcggagtggtttcctgaactaagtagaggactccttcatttgcatgttgctccatcaaattaaaaagactctacttggaatcttaggcaatacttataatggcatgaaggtacacatagagcaaaagcttgagaaggaattcacaatgtaatagttggagaaaggaaggggaatgtggtgcatatttttggatctataatctattatgattataatttaaaatgtattaaaatcaacaaattctaagttttagttagctcaaagccataagttttcagtgactgtaacagaagtacagtgtccatttcataaaagtcacaggatttttttttttttgacattaggaaataatgaaattttgaggagatgaagggatttaatctgattttgtgctctacagtgtgcacatgtactgaaacctaacaccctattatatacacagctttcctttttggtctgtcagttaaaaagaaatttaaacatataaaagtatattaagattgcaaaccagggttaaaatttttacattaaaaagatcaaaagtaaacacttaaacctgaaagtttctgcttctaaccaagtgtcttataaaagccaaataaataccaagagaaaaggaatctcaactatatcatctttggctctgggtccctgtggtttgaatttaatgagaagaatcccatgccatcattatcctgaagctacattcagacccatgatcaaatatgctttagaatctcagaataaaaacaaacagaaaatctctgtggaaggaaagttggctgcaggggagtgagagaaagggagaggggtgggggggtaacagaggcaggaaataacctggctagaggggaggggagggaggagcaagagagagaggttgggcgggtgacagaaacaggaaataaacattggaaaggaattctggaaagtgccagaaccctctgttggtccttacctgagaaaatgtttatgacatgatggccttatcacacaaataactgaggccacatgatttcccttttacatgacctacccaagttctgtataatttgctttggatatcccaattggcatttttataaagccgacattaatacctttactcagctgaaatactattatgtatttcaaaacataataaatgggaaatggttctcattaaatcttgtacaaatccctcagaaaggaaaggctctcctcccctctgctccacttctcctgttcttgccctgatctccactcccataactctcctgattaatgaacagaaacagggaggggagtctattgtctcctcaaagggaaacattaattctaaagaaataagagtttaaaataaagcacaaagccccggggcaactgtgttctgtccctgccaaggcaccacactttggtgactaaattataaatgattggactagtaaaactagggtactattcagacaggatgttggaagtattttaaaggaagaaaaagtattcttcaaattttaaataacattctgctccttagcaattttaataggtattcatggagaaaaaattctgaagttatcctaatagccaagaagagggtactctcccacatgggactaagactgaagttttcttcaaaactgcacacagttaataaaaacctcagtatatctctttgaaccactcacaaatttacaaaaaactacaggtttcaaagaaagtggtgaattacctttaattatcagagttaaccttataatccaagaatttggttggttttcaagtatgtgtacatcataaaaataaattcaaagcaaataggtttattgtctttctcctgcttttggtgttattctgagcattttagagactgttcattaacacttacttaatgtttactctgctcaaggatggccctagtccctaaaatcttctcatgtattatggtagctaacaggttacactaaagatgtcagccccatgtgtataaatatagctgtaaaaacctaggcatagccaaacacataattatttttccagttgccgtgtattagaattcaatctgagctaccatatttctaaatagaactagaattaccatttcttatttgttggcagttgtaatgacaaggacatcaactggcagacatgtctctggctgtgttgaaaagacccccatggatatatttacagtcccagtatcacggtactatgtcttcatgaccaagaagaccagattggtgctggacctgaagatctcccattgatcctattagctactggggtgccttactaggagtgctaactggtactccacaagaatatcagtcacacatggatggtgggaatgaatgtgaaagctcctcattaaagattctagaagctggttgccccttgtgatagccattagcccaatgttgttaccagttctggaaatgtgtttaaatctaatgctctataaaatgacttccataagaaagagattatatagttggtgaaagtttggacagtcttcaatataagatagatgagacatatatttgttttgttatgtttggaacaaaaaaccactcttgatacttcaaagactaaaaaaatgagtgtgctgagcagagagaaaagctcaactaattcacatacatctaaccttagtacagaagctaataatttttccctgtaacagacaattaataaatattttaggctttatgctcactctttgtctctatatgtcgcttctcacatatgtatgcatgtatgtgtgcacaggtgttataatgttttaaaaaggtaaagctcatttttagcttctctatagttttcagcatcttactgttattaagatgaaacgatacaaagccattaaaatggcttgtagtaagagtttttgtagacaaagttttatcaaaatacaccatagccactcactaatctatttctaaagcttctttcatgtctcaacagctggcccattgcaaaagagatgagtggaccccaaagtggaaatgggatgtgtctataatgggaaaggaaaatgtgggactctgggacagggtggggaagtgaaagagctaagttataactggccgtgctaaaaggttgatatgtaatacacagaaatgaaaactataaatatagaagaatattatttagagatttggagataaacatcaggaggggtaatatcaacccaggaagaaaaacttttgtccctgaggaacaagaaggagcactcctggggaatgataaaaagcaaggacatctgttcatttcttaatcctattagaataccatgttctaactgattgacaacaaataacacaaaaacagagtgtgctggaaagtaagacaaaataacataaaactaaaaagtggtcatggtggtttctaaggcccttttatttggagaaatgagaggtgaggttatttatctgcattaacaattgaagataaatcactaaatggaaagaaaaagggagagaggagagagggacagaagatgccgcggaaaggaagggaaagaggagggcaggggaggaggaagggtgtaaggcggaaggagcaataaggaatgagaggaaaagaatgacagaaaagggagggagggagggaaggagggagggacagaaagaagagcccaagaaatgagagggggagagaaggcagatgaaagaaaaagaaaaagcagtggaaggaggaaaagggggggagatggggaggaaaagaaaaagagaaggaggagggaagaaagaagaaaaaagtaaaccaaagaaattcatgactcctaagccataaaaaagaaaaaataatactaaaaacctcaataattctaatttataatcaggaatgttaataaaagaggttagaaaaaagcaaagcaagatttaaaattactcaaaccagtagccaaatatataaatcatatactagtatagttaaatgagttacattcacccagtataaggaataaactacatgtttttttttttccattatccacctaggttctagttaaaaaaaaaaaaaaaccatgaagttaaacaaggtaatctcgtcaaaaattgtcagggaggaaaagagtcagaaaaaaatctttacgcattaaggaacaaacatgacagaattacaagtggttcatgattacaactacagcactccttacattgccctcacattcattaaaacaatgagaaaaacagttatggattgcagcaaagttcttgtctgcaccacatctcttctcatccagccccacccttttcttcttattctctaatttatggtctgctttgcccctgccatatgttagatcttctctgaggaccaacttggactgttggagccattattcctatggaagtagaatttcaaaatagctaggaaaacactagccaatgatttcctgacctgaggttgggaaaatctaatactcttgaatggagataaaatttaagacaacctttactatgtgagttcatcttgcagaatctcactgatgtaattagacatttttttgtctccttttaccctctccattctctctcctgcctctcctggttcctccactcctaactggcaatcctggaagattttcctaagcaaatctttttttatttgattcctcatcttattgtcttttcatagagaatactgttcaaggtagttgctattgggattgttgaaaatgcatctgctaaggtaaggggcacaggtttactcacattctggtcacttggcaatcatgcccgactcacaaaggattgttgccagctcttgataggctgtggtgttactatttcaaagactttcacctagaaagaatgagaacagaattgacttacacaggatgtatgcctgtgtgaagtccctttatttgggagtactaaaggcaatgcctttaatatcagcagtaagacaaatccacggtcaatattgtccttaaacatagtatatgtgttcactgactagccatttaaattaaacaatagaactaaagcatgaaaatgtaatgatgtggagaaacatggatgagctttgatgtaaaaataaaattgaatcaatgcacatatacaatagacataaaatcatggtatatcaatttaaaaatgaaatcataaaacatggtggtgtcctcttagaatatatagtgcagatttatctaaccaacaaactctcagaaaaagtaagtttgccatgttttattctaaatccatataacaaaacaagtaagatataaaacaggaatgatacacttagaaacacagtcaaaagtttctagtctctttaagtcacacaaagtgttctcattccattctgctgttatggcaaataccatggcaaaaagtaggtgaggggaaggaaacatcttatttttaaatcttattttgcttacaagatatagtttaacattgagacaagaaagtcaaggcaggagcttgaagcagaaaccatggggaattgctgcttgctggcttgcttatagcttcatgcttagacagttttcttatacagtcctgtatcacccatccagagagtgatgctgcccacagtgagatggacatactctatcagttaagaacccagactgtccctcacaaaggtgtcatattctgacctaaaccagacaattcctcaaatgagttaaccttctcagatgactctaggctgtgtcaagttgacagttataatacagacacaaggcaataagtaaacgacaaacaacacaatagaaaattagcacttatacctatgaaaacatactcaaccttattcataggagagaaacaaaatggcaatgacacacgtcctcagtcacccatgaatgtgcccatagagctgtcttcttgaaactgtgtctattctgtcaaacatgaaaaagaaagtgactgaaatgaattcttacatgttatatgtttttaatgaggaataaagtttacttaggtgatcgaggaaggagagaaggcaagttcttccaaggacgcaagttcatattctttaactggatgagataaaccatgtatggtggctcaccacatacgccaaggactctagcgactgatacagaaggtcttcaccaaattcaagatcggctgaggttatatagtaaagttgttctgggtgacagaatgagaaaacaaacaaaagagggaaaggattggaaaatttatgactttttatattaatgcaatcattgattcaggcaaaagtaagtcataatgaacaacacaaaccactggataaaactttgctggaaaagaatattcatctaattataaatatttgtgcagagattatccatacattttcaaaagggaaaacttaactttacaacagagagatctacttaccctttcttgggtaaccaaagtaattgattgacactgatagttgacataaaaatattaataacccaataacatctatgtacaattcttggcaaaaatgttgagcctgaatcaaggagagcaaataaaagaagaaattcagaacatcaggaaaatttgctcaacagactgtctagtgttttcaaaatattcaatataatgaaaaatgaagaaaaagaataatctagacttaaaaaaagcttgagaaaatatggataagaattataaacccaaataattcatggaaatactatgagttttcttacatgctcataaaggagagcactgttccagatgtacagacatacatataaaatatgtacaacatatacaatttactaacaagtggcttacttaatccaatgtgtaagtagagaagtgacaaatgccatacgctattatagttttaacaaaggtttgtaaatagttctaatcataatccaaaatcaaaagacatattgtcaaaatacaataaagttctaaagagtttatttaaaaaacttaaaagatctcctacttattaatagaagtaaacttgtgaaacataatgtgcactaatagtaaactaatgaaagaagggtaaaaacatgactgtgtatgatctctgcatagatgggataatatgtagctatttcctgtaaattcaaacattgtcttttggggtaagaaggaaactcgtaagactcaggaagctaatttacaagactcagaagttacaaggtttacaaggtctttccccaagtcagggaagcagtaaaacattgctgagaagaggcaatgtttcagtggggctctctcccagtcctgcagagatctccagggatgaagcttccacaatttctcacccttgctggagaggtctttccctggattgagctgcttttgagccatcaagctcctgtatgcagccttttaccatgttataagtagccccaacaaattcatgggctcactaaaagtcagacctgaggttaagcatctctttgatctatctatcatcagctatatcttgggtgaatagatgcttgctcacttgctcacatctcccgagaaaaagtcacatgacatgggaataagaagagcaaacttttaacttcataaaatatttgttctttcggatatttaaccatccttaaatggttaaattaataattatttttgacaacaacaattaagtttaaagagagcaatgaaaaagtgaaaagaatgaggagaaaatgggatggggttaaaacaaaaccaagtataaacacaatgatgagaaatgaggagcaacaattacttttctgaaagctagcaaattaactatgtcttggtcagcatagataaaagtaaaaggagacaagacatagcaaattttaaaagaaaaatgcacatgacaactaacaacaaagtatagatttgaaagtataattgctatgaatgcaacaaaacttcttagaaaacaaatttaaaataacttttaaacatataattattaatatcaaccagaataaatagaaaatttgagtgaaattcttattggttagaattaatgaatagtttcaaatcatatttcacagtaaattacgattgggaaattttacaggggtttctacaaatacttcgaggttatataattcttaatttatgtaaactgctcctccaagtaatacaccatatagactccctttcataaaggcatgtttagttagatatcaaaagctagaaaaactattaaaaacaaggtcaatgagaatcaaattttaaacaaatgcaaatgtgtgctatactgttaataaataaattatttgcaaatgagacaaagtcataaagtctgtgacatataaggatatatgtgtgaatatgtttgaaaagtgactcaagtgaaaacaagtaatggattattcacagattggtaacagagaaaacatataaaaactacctttagatataaacgactagtccacatttatcaataataaatattgcctgaaagaacagtgttgcttgtgaaaatccagcagggtggacctacctgaagtacagagaagggaacaagtacaaagcagagttaagatgcacttcagctatgtcagccacagcattcagcagggatggttggtcgttctcctgtcacagactctaacccatgatgagacgagtaaggtctgtgggatttctttttgtacaccatgctctttccagatctagcctgacaaaaagaatgctgaagcgatcggcatacaagcttcgtctgggcatttgccagccagcaactgcccatctacaagcttatctcatcaaccccagactcttgattacaagttatagtactctagccctagacactaacaaaacatctcatcttctcttctcagccctctcctggccaacatactcctactgaagacataacagagaaaaatggaggggagaaaaaccaactcagacatatttagcatatgtaacacacaaggccatatagtgttacctaaaacaaatcaatcataaaatatttcagggaagaaatatatagatagtgttttctgattacacctctgccagaaaactgaaagatagaaaattaaagtccccattcaaatctctggtcaaaaatacatggtaattaattgatttaataattcttagagataaaggaaaagtaacaacattacatctaaatttgtgagaattcattatggccacattagataacaagaaaaactaagaaataaagagtaagtcttcaatgtaacaataaactcaatgattgcagttagttaagaaagtgaaataaaaaatgaaaacaaaatacagaagctcaatgaactctaactctttgaaaagtaacaaaataaaagtaaacctataacaatattagtattactaaaaatagtatgaataatagaagaaacatcatgctaatgtgattaaattaggggggtcgggtagatgactcagcatacaaaggtgcttgtaccaagcctgatgacctgagatccctgaaaatacacagtggaagtccagatccaactcccaaatagtcctctgtcttctacatgtggagcatggaggatgcaaacttgccctgcaaggttctcccctctctctttctttctgtctctctttctttctgtctctctctttctttctctcttctctcccccctctctctctctctccctctctctctctctctctctctctctctctctctcacacacacacacacacacacacacacaaattaaaaataaatgaaatactattaaagtatttaaaaataccaaggaaataatgttcaactcagccttactggattgaaatcctagaagagacaaatggaccaactgctcaaacttcatcaaacaaaactgacttgtgaaggtattaaatcctaggattaaccagctcttcgttttccttaacatatgtaaaattaacacaagaccaaaaatgcttcatagcagactcctataattgtttttaaagatcagtataatgaaaatttgcatattttaaacccttagttgtaactttaaaaaaagaatgtcttacaggaagtaacctgacaggaatgatcaaaaatctacacatcacaaacaacccaaatcccttctaactggaagacgttaattgattgtgctctatttacaaaacaagagtgtgaaaacatactctacagtgtaccattatgttgagtgaagtctgaccaccattcaatatggaactctcttcatccagcaagcaaaatcaaggcacacacagaaacacatgaataattcctacagggaaagtaaaatcacaggacatagggcacaaaaaagaggacatgaaacctatggacatgggtacccatgacattatttgagaataggaaaattatggctttccatcttgggctaatctttctgttgcaacaaacttagagatagaattctctgtgtcagagatcctagaaaaaaatataacatgactgcattgtgttggttttagatacttttctcattgctctgacaaagttcctcacaaagccaacttagtaggaaagagtttattttggctcagtttaaggcaatgccgtgtaatacagtggggaaggcatggtggtagaatgggaggccaagggtcaggtcacactgcattcatactcatctggtgctcatctcacttcctctattctttctacttcatttttctagcatccaaatccatggagttgtgcttcttacattaaagtggagactttcctcctaggttcaatctctcaataaacaatatgactgacatgcccaaatccaatcaagttgacaaaaaagataaatcatgatgtgtgtcttagggttccataattactgattctttttcagtgtgagacagagaacctagggccttatgcatgctaggcaaatgctctaccactgagccaccaccccaaagtctaataacaagtttaagtcagccagctattttacagaaggaaaagaaaaaaaaggctaaccttttctttccacaagttggcaaaggtttaaaatggataatgtccatgtatttgtaagaatatggaggaaaagaaacttgaatattgactcaagagtataaatttatacaaagactttaggaagccatctagaaatacatagaaaaactaaagttgtataggtactataaattggaaatgtcaccagaaaacaccatttaaaaattctatgtaggacacaaaatcctttcttagcagcaaacaccatcagaggtccaatgtaatgtgtgctttgcccctactactgaagcctatgaactaaatttgcatatgttaatatccccaaagcatcatgttaaatagaaaaagcaagttacactcagcatggccccatctctgttaaagctaaaagcactcaattttgcatgtttttttatggatccatactagaatatcaaggatttccatgaggattcaccagcaaccaaaagatgctaccttttggggtgggtgagataagaaggtgacaggaaaaggttttgatgtgatctatgtattcatttcttaaaagtgaaaagtacaccttcagttcaaggaaatgagcacaatgctgtcagttaaacccacatcctgtgttggctttattgtctgtaaatgtttttgtctatggtatttgattatatcatccataaacctgaattgaatgggattgtgtgacaatctagtgtgacacctgcaactctgctaatgtccctgtaagcatctcccttcccagaaggattctgcacacaccaacaaagcaagcactggaatccatggaattgctcatgtgtccagtcttgcctgaaattacctacactcacctaagcctaaattccaactcataaagaggaaaggaacttggaggaaaatgcctaggctcctggggaatgaaagaatgggctcttttttttgcagtggattattaggattatattaagcaaagccaaatcatccataaacaagcatttcagaacccctttagcacatgagagtgctttcttaacatcttgaagtgggagtgctatcattttaaaaggtgtgtatactccacaaaaatatgtagaagtaatgaaaaactataagagtacaagtgagagccatatgaacaccataactcatctggtgtttctgtctcacagcttcagactcctaagaaatcgtgggtcttggtttccatcaaattgtgagtcatcccactgtaatcacaagcaagtctcaacctggacctacaatccttgttctcgagcagcaggaaatcttacaatctctggaaagggcccgcccttcattactatgagcagcagatagacacagtgactaatggggtcatttgtcagggcctggtgctgcatacttcatcctggcaaaatgcttttccaaggagttaaccggaggaaatggctacaaataagagcattaccagaaggagaaggattgcagattgcagtctctagcataaatagactcatgcctattatccattgaaagacacaaaggtactcatattcattgtgagctacatgtatacaaaaaaaaaaatcacaccatgaaattcaggaccaaattcactaatattgcttagtaaaatgattcactgtggcaggtgtttcaaagaattacaaataaattctgaaatttacaaaaaaaactatgtagttgtttttctaaccttggtttattttaatctgcttatattaataattaatgtatgaattaatttaactaaggaaattttcatacagcttgaacattctttgaatggtatataaagtcctaaatgtccttagagggagcactcaatgtgcaagaacagagtgaagtcagtctatgttcctcctctgagcatctgcccatctatttcctcctttggcaaacatctgataactattccctgtgtagggggaattataacaggaatgaataaacagtggtgcttcacaataagcatgtttcatatacctaactctatataagaacttcacaggtcctaccttcatgagctttgtatttagtaggaaagacgaaagtgataaattgattataattgtaaaagaaaacctacaggatttgtaacagcaggctgaatagcagcaccactgctgttataaagaccaggaacacagtttctacagatcttccttattttacccaatactgcatttctctaaaacccaagctatcttcctgacagccttgctcagtcttctgtcttctctccacatgctaactggcttttctgtaaggaatttggactcatgtttgggtaaatgaaggtcatcccatgcctatgcagagatgcacatgaacacttgcacacaattcttccctacagggcaccaagacacccaaagaataagctggcattgcagagggaaagtcatctctttccagtgtgctcacatccagacaatcacagtctagcttctgaacagaaaatgtaagcaggaggcaagaaatgggtaatgaaggaagagagacagaagctaaggaaaacaagagaatatgaaggaaaggaaaaacagagagcgtacctgcagaactgtgatgcatcttttctcccttctttttcacactttcctccttagctatagactctcacgaatgaacactttaaaactgatatcctcagagtcccttccacttgtggatcacattgagaagcaatggcaggcccctgggtgctgaggacactaaggtcattttaagtaaatctaaggaagctacagatttgatttgggaagagaatggtgctttcatgtcttctgatcacaagtgcctggaaggcaggggtgatttgtttgtgcattggttgaacagcagtatggaaccactgcttcttgcttatgctctgcctttcttaccttttcttcctttacttgcaacagcttcagccattacacacacacacacacacacacacacacacacacacacacacacagtcaaaattgtatccagcacattcttgagatttatttatttatttaaaaagtgggtttcactgggaggtggtggatcacgcctttagtcccaacactcgggaggcagggcagagatgggtggatccctgtgagttcgaggccagcctggtctacagagcgagttccaggacagactccaaagctacatcctgtctcgaaaaaccaaaagaaaaaaaaatgagtaaatgagtttcatacttgatcaaacacacagagaacaactcaaactgaaaatcagatgtgtctgctaaattatgtgttgatataacaaaatacctgggctgggtaacttctacactagaaacaagttatttggctcataattctggtatatgaaggatccaaacacattgtaacagaatcctggaaaggcatccctcacaggacagtagagaactagccagcagccagcagaaggagaatgtgcaagcagggggttgggggtggggcgagggaagagttagagagtgggaggagttagagagtgggaggagttagagagtgggaggagtgagagagtgggaggagtgagagagtgggaggagtgagtgaggggagttagagagtgggaggagttcggattcccctgcaaacctgctggggaatctcctgctcctaacagaccagcattaattctttctgagcacaagcttcccatgatctactcatctcttgctcggttccatctcttaaacctctgccacaggggaacaagctcccagaatacgaccttggcagcacaaaccccagctaagccacagaacctgtcttctcagtctcccagccactcctgacagcaaatacgtcaacatagaatgccgacctttcctgggccctctgtcttctctcattcacattcacttgctctaatgctgtgttttccagtcaaaacagtcagtttccctctgcctcatgcctagcccaacttgttcctccactgagagccatcttcctgccaaccaaattacccatcatggtgttcgtctcaagaaacacatttgttgcacctaagaggcattctttccctgttctcaaattaacaggcagttttccccctctttattacaatttaggaaacataattgcaaaatgaaaatgcaaaagtaaacagaacaaagtctacaaggaatatattgaaaggtaaagtatgctataatacagagtttaaaagtcccaaccggtaacgtgttcaaagctctattgaacccattgtaaagctttttgtaatggtttctctgcatccaccagttcttaaaatagcaataaaaatctagcaaatcaaaaaggttttgtaaagcaatatagggacaggggaaaagactgttaagacgtaggctaacaggcaaacagtaataggcatgctagaactcgggcatagtggtcacgactcctaaaagcctagttgatggtgtttgtctatgagtctgtgctggcgagaaggggaggaccaccctgaaaaggtatccacagtgaacctgattggtaaagctgggactctttaggtcagggacagtggcatttgtgaagtagaagctgcaggattggagttcaagattgttcttagactagtgagtttgaagccagcctgggctacattctctcagaaacagacaaaacacaaatgacaacaaaaaacacagggtaggggagatagctcagtgagtatttactgtaaaagcaagagaaagctgaattaagttctagagtccatattaaaagaaaaaaaagaaagaagaagaaaggaaagaagggatagagagaaaggaaggaaggaaggaaggaaggaaggaaggaaggaaggaaggaaaggaaacagctgttctggagttccaaatacaatggaagtaggtggtattttagctgaacatatgccataggatgaatgaatcattataaaatttataactggaaaatctgatcactgatgattcagtgttggggggaggattttggagggcaaatctctcaggaatgcatgtctaattagttttcttatcaccaggataaaatatctgtaagaagcaactcaagtgaggaaagaggacatattttggtctgtgatttgagaagaatttggccaggagacaaagtggccatactgatagctgtgtctgtaagaatttgctcacatgtgggtagatcaggaagcaggaagctagctggaaggcaggaccaaggaagggccagggtataccctcagggattgattgttccttgatgatccatttcctccaatgaagccccatccctaaaggttggacaaactctcaaaacccttgaaccatcgagggaccgaatgttcaaacacatagcccatggggcatattaaaaccatagctgtgaccttagaagagaggcctcaaagaacacataggggaagggaccatctatgaaccaagaaatagaacctcaccagactagttctctgatgatgctcatttcccatgagaagtcgtgtttatcacgtgttaattactcgggctctggggtttctttacagcatcctaagcatccaattacagtaactcatatttctatgacacacttttacataccaaagaaagacatgggagccagccatttttatggatttgactgaattaaaatatttttttctgtttcaaaacataaactatgggcatctgtgccacgaaaagttgtccaaagaagaaaatttcagtcatatagctccaaaaatgccaaattaggaaagatttattgctgacatgattctgccatgctcctccccacttgtcagctgagtcatgttgctctggtttctactattcggtttcctcataggaatccacaaaggacctcctcataacaaatagccaattcctcaaagagaacacatttaactttacttaggaaaatcaaaagagtgattgtatcagagaaaagcaaggggaatgctgaaggctttctaagccttaatctcaaaggagtattttctgctaaaaatcaattgtggaacatgaaggcaggctttttgtttatttgctttggcttgtttgtctttgcatggagtgttggaagcacacagtgcttgctgagatggagtagcctttcatccgaagtgctttcagaagaatgacacactctggcgaactttctagtgagtttccaaaccttgctgagacacagatactgctcaccccgtttgtaacgcagcaccatcctccaccttcagaaatttcttctccctttctgtatttactagcatcagaggattcacttctcacaagaccctcgttaggtatcacaggggacaggtagtgaattaccagccccatacaatcaaaccttgacttattaccactgtctgaatagcaagaatctgaggctacccttctcacttcgatgcccaccttatgatcatgattttctacctgcctcacagtggcccagtgcatgggaagatgctactgcatgggtttatccacatatctctcctgttttgactgttgcttcatccagagaagcatgaatctcctattcctttctggtctcccttgcttcccacttacaagtgcctctttgatgacaccaggcctacccaggtaaccaaaagtaatcctgtcatttgaagaaccataaccacacctgtaaaaacagagtgcttgcaatttatgatagttccatttgccatattttgactccataattgtgtgaaagtcatatgcattccatagaaactacacttcaaatttccatccgttctcaaggttgtgatgtgacataaaatatactctcctggtgtggcaatggacagtagcagtgagccatagctccaggtgggccagaaaaatcacaaggggaaaaatgacagcctaaagtgcattgctaagcttcgaccttcacagggaaggtgtgcttaatccattttcaatggggatcatttcaatttactatgcatttgtcaagacattaccctatctatacaagctagcatagctactagtttcaggaattaaatgggcatctgtgaatagatatttattctgcttaccactgagagcaagtgaaaaatgaacctctttaaatgaaatggatacaattttaaaaatctaatctgatgtcaaaaggagaaagacacattagaagctaactctaaagtcagatttcttcagtgagactcctagctctggggtcttccacaaattgtttaacttgtataaactcattttccctatgcaaaatagggataatacatggaacagctcttatattagttgtaaggaataaatgagattatacagtaccaaatctgaatagggattattaaacctctcaataaacatgttactgtatgaatgtatgtttaaaaggtaagcgtttggaagtcagctcgggcaggagatcataaagtctccattgccataaattgataaatacccaatatagaaggtcttcaggctgcaatttccatctttcactctattttacatatgtattcatttttcttccaccttcatggaatgatgtggttataagtgctttaccagattcaggtctagacctgtagacagcaaagccatgtaagtggactgcctgaggccttgagaaccaggttcacacctccatgtgaccagaaaaaagaaacagggatttaagtaggattgttgtggaatttaagatttaatattgtttctcctgttgagttttaggctttttggaaaccagttactgctcttttcctgcctatttcttccttttggaagaggaatgtcccacgtctgtcttacattggattttagaagggataacttgctttgttctcaagctcatagctagagagaatttgtcttagcatgaattatgtctttgaatttactcctaagttagacaagaatgcagagtggaactaggtgttattacaaggatattgtggagttttaggataaaattaatgcatgaggcattctgcattccagaagggaatgcattttatttggggaggaagagagggggcatgcatagaatcagactatgaagttagagcatgcaccctgccccaagtaggtgttgggaatttaatcaacaccataatgtttggaggtggaaactgatgagaaaggtttacattaacccacactcatgagtgggttttgacaatcttgaaggacttgaagctataattttgtatcttcatgatatatatgatgtcttcaccatatatgccctctactgtgggttgactaccaggaaggcctctacctcataatctttgtcctttctagcctttagaactgtaataggcatgcttttgctctttacacaggactcagtcgtgtgtgttctgtcacaggagagcaaagtggatcagagacacttagcgttcactgtaaacattttaaatcatctcccatttcatatttacagatcactagacctcacagcacagaagccagagtgagttttgctttgtaacattcagttctgttagctttctcctctgcttggaagtgccctggaaggtcctgcagttctcttctaacagtgtttgctcctcgaatgcctcagcgtatgacccatactgacttctgcactgttcttgggaaatgtttcctcttgacctgcttcaccacacccacttctttactcttatctagaacacattagctgcagaaatctactggctgcctatctctgccttgtttccagtgctagggagtgaaccaatgatcccataggtcctctcaagttgtgagcaataaagccagttcctgcccactctgaataaattagcactttactccatagataatccccaatgactctgtttacattttctccaaagcactttcttacctcctgctatactatgaaacacctacttactgcatcttttacctgacttccccacccagacatacattctaagaaatcagaccattttgtcccttttattcattgccatatcccttttgcctagaacagtgtcacagagacactagctcccttgtttaaattgatgctttcacttgatttctactaaaagagatcctacccatagcccatcactcactgcaaatctctcctccaatccttcaagaagcatattctccattgtcagaagcaagtagtttatgaaaccatcctcctaatatttttttaacacattcctggatcacatacttaagctcataattttcacaggggaaggccaaatatggctgggaaatataccataaaagtaacagccaggaaatttgataaaattctccctgtcatagtaagtcctcttccactactgctgttttactttgataaccagatatcatctcattcaaggtttatgagactccaatgggatgcacactacaatcccatgttacagatgaaagaacagtcttaggaaatttaggaacaccatagatgcctgtaatcatcatgaagaataacgtgaacattgagttgctcaacccccggagtctacatggttttgccccttctttctctctaggaagaattggcatccatgtaaaaattcgtgaaaaccaaaaaccacactcaattttctgttgatccctagagaaacattagtagctaaagtatatatgaaaatatttctactgtgtttatactccaatcaggaaaaatgctttctttaaatgcttcctatgtgtaaactccaaatataactctacagcaaaacctcctctgtgtccctgtagcaagcagccatcacttcttctgaggaaacaatggcttagcaatcatccacatagccatttaagatcttagtcagaccccagaagacacatattcgtaaagttgactaaataatggaaacaagcattccccaaataatataacataaaataaggaaaggaaagggatgagacaacaaaaacatttgagttaatctaggttctctctgttaagaaagaaattaaaataaaaacagagaaaacattcggaacttggcttttaaaaagttaagccttctgaatgaatagtgccagatgtcacattatgctctccatgctggagttgagctgccatcactaggtcgtagaggggcccatgtacttgatacagtgtacatactgcagcttcctaagcaacgaatgttcatgcagaaggagcatcactcagagcccagtgaaggattacagtttagaagaacagagcccatgtctctgtcctgcattttcttgagatcagtattgagcttcacaatgtgtttccaaaatctattcccaccttttttcccctatcagaaaaatgtcagcaactaaaagtaccagtttgactcctttatttttcaatacattttattaacatataacatacctttacacttatatatggagaattggaaactaataaaagaaaaatgtcatcttgttgagctgactctgcaggatgcatcacttttggtatcatccttcttttccaaaagcataaatcggtctctttcacattgccccgaaaacacttgatctcgtcgaagacaagcaactaaagtggatccctgcaggttgtctagtgttaagcccgtggagaacagtgatcatgtgcccacccagctgatcagtgtgttatgcactgcatgctgctctgttgactaacaactcttttatttgactacactgcaatatgaaaccaaaatacttgaaaacaacatttaatgattttaaggtattagatgaatcataacccataaaatataattctgcttcttattgcccagggtagatattcacaagacactgatcttgtctttcctctatttctaactgactcagttcccattttaggcccctcttactaagcctgaatagttgcatgcctagactaggatacctgaggtggatttctgccctccctcctcctcctttcttactttcttcctttctcctaatttccttcctttctcttcctctcttctctctttgactctgtctgactctcccctccttccctctcctttcttctcttccttccttctcttccctatcttctctttctttcctctctccctccttcccttccttccttccttccttccttccttccttccttccttccttcctgcagtctcactatatagcctagctaggacccaagctcataatattttttccttagcctgaccctgatgggggaagtacttctgtgtatgtttatcttattgattgttaaataaaatactgtttggccaatgagacagcaagttagacgggattaggagtcaaagaggattctgggaaatgtagtagagaagtggtgatccaggcaggaagtgacatagcaaggagactcatttaaagaaggagaatcaggaagtgtccctccttttcccttggcctcctccagcggcggaatgtgatccaccgacaaggagggacaccaataaggtgtccgataagataagtcttataaaatatataggtttatgataggtaagactgagctaacagatgagaatcctagtcattggccaagcagcattgtacctaatacaagtttctgtgtattcatttgggacctaactcaggaggacggctggcgtaaagctcacacatggtggtggggctcaggcagcttttggtagaaagatttattgtaacatgacccaagtgcttggattgtagacatgcaccattatgcctagctgacattcacagtaaatataccagcaaaactccattaaaagttgggggggattctggttacattttggcagagtaaaacatttaaaattttaaataaaatttaaaataaaaagtatggacagaattagaaattcttacaaagtctactgagttgaacaataatctgaaattttagtgcattcaatgtatattcttatatggcatttattttaaacaaaaccaagtggccaatgaaaatgtgttcattagaaacccattctcaacacctactgtgttaataagctttgaataactgtcacaaataccaggaagaaattgtctaacaaagaggaaaggcttatttggactcaaagatcgatcagagatgccaattcatgatcgagtacgcctcagtctggggcctctggtgttcagagtacatcaggggacaagtcccattaatagcacagtgaggatgaagaaaagagaagaggtagggtcctacagtccccttttattgcacagcctgagtgacctcattctacattccatgtctcagtgtgctttaggagacattccagatccaaattgtatcatatactacctaagcatggtaagagacaaacagctccatttaagaagcaaatcagtaatagctggttttcaaagctaagtcttcataataactatagcatgatttaattttctgatcttcagatactaaaatgagctctgcattcacggacaattctaatggtcactgttcacttgttctcaacattgatgacctcaccacaaaccaacatgcagctgggtcctgttttaacttatggtcatcttaatttgaaatcatatcattgagatgattccaattgtttgctatgttaactagcattgtcagttcccttggtcctcacaagaacattagaagttaactcagtaacatccaatgaattttatatattttattcatttaaagtgcttgattcctgtcaataagaatgccaaatgagtatcaagtaccctgttcacacagacagcactttgagttacagatggcccatattcattctttgcttagctgatatgacattggaaatagtaaacgtaagagaaagggtgttccttaatacttagttcttttcccatgaatttctcttccctgacctcatttttgtggttctcttctccaaattgaaacattcactctttgaacaggaatgctcctaagactcgggaagctaactaagaccctagaagttgccgagttacaagatttggaaggcttcaccaagatcataaaagcagtaaagctgtgtgcaagttgtgtgttattcagggagcaccaggaatatacttcgtgtaaattgtcatctgtgctaaggtaggcttttccaaaatgcaactgtgctggttcactgacacttctgtaaataacttcaataaactggatggcttgccaagtcagacttgggtagaaccattttatcagtctgccataggtgacttatctgggatgaatagccatttgttcacatctctgcagaaaaagtcacaaaacactttactcacaaacctctacttcatgccctcttgggtgtgttccctagcttgagagtgaccattgaaatctcagtacaagatctgtcctactattgaaacaatttcaactggaatatattgactctgatatgaaactgtctgcttcaagatctacctatttttgagtctttcttcagtttgttccatctcttttaagtctctgacatacctataaaatccctgacatcttaatattctacttgtttgtcttttatattgacatttatgctctttatttgattcctgggaaacagcaagctaaggggaagtctggggttctgccctgtacagtgtcccaatttattataacttgtaaactttagagatgtttgcatcaaggagattgccagcatgcatgaaagaatgatgatcttatcactcaaaagtatgttaaaaaattgattacctgagtcaaattcttaagtaggctaaggactatataatggtgaaatatatctccaagattcagagttcttatgtaatagggctgaagttcaagaataaaaacacatacttctacctgcttaataaaattcatgttttgttcaggagaatgtacaattacacaaggggcccatgatatccaaataatcagtcaccttggtatttagaaagcattgtactataattccaaactttatttgaatcataaggagttttaatcatgctatatcagaaagactatgaaattttacatgggctaacattacaaagctatataaatttaatatataaatcagaatttcccaatgctagatttttattggaaaaatgatagcatagtcttatgttctagaaagatcgttacaggaaagtacaaatacaacaatccaaaaatacttaagtctagctctccctatccattgaataccacttgttaaagggactttatataaattatttattgtgtctaggtcgcaattttatcatctgaaaatgaatgatttgcttcaatctaaggttaatttgaaattttattaatttttctaatattccaggtaattaaagacaaggaaatacactacatatgaaagattagttgagtcaccacatcctatatttaatacgaatgacattcagactttataactgaaagttaatgccactatatacactattgttaaaatcaatttataagctaggctactctgagcagttttataacttatcacaattaagaaggtttctgtaataaacattcccttcatctgtaagtaaaaccattctctattatgcaaagtttaaaaggaaaatataacatgcagaaattttgaggttggtgacttttaaaaattagtaatgtaaagcaattataaaaagtaaatacatattctgagtggcatgatagtgtcatgttagggttgtttgttccattattaggatataattgttactgccaaactctcccttctgggcccctgttctgttcttaacttagaaatgctggatgaactcagagaaaaacccaaaagcaataccaatgcatcattttggcaaattacagcagttccccaagcatgggtgctggtacacatttcatgagcagtatgcttctttgtgattatctctgcccatatcacctctgctattcaatggtttggggaaaatgtatctggactagagaaacatcaacaccgaggaccaagatgccagggacgaatgatgacttattgtaaataacttatttcaggtaataccagagatttattcagctagatggttggtctctgatgcctgacagctgtgtgagggttcagaaatggtagctgcttcttcagaaattgtcacaaataagagattttgatcatttttttccccttcaaatggccctttgtcctgggaaggaaaatatcagggagagtggaaatcaaattgtttttgctcctccctgctagccacttataaacagatgtagagtttgtcctgctaaggaatttcctagtaactacaaataactacgttttcaaaggaaaatgaatgtggtcaatgtccctataaatgtgtcagctactttctgggtttgtcctggtttgtctcagcgctcggcatctttgcttaacacaaggttgataatgcttgtgagcatgtattaaaggaaacattgtttgaaagagaaagtcaaaagaaaggtccaagacataaagattgtgaggaaaccctccatgtggccccattcttccctacttgggtcgctggactttgttgtttataagcagattcttactactagattggaaatgacacaattctccagctgagctctctacatgtacaatgcaaaggaatttttgtttccatggatgaagtgcaagtgctacaataatacaatagctctcattaaaggtttctagatactgtctctggtattactatttattcttggaataacctttttggggaagtgaaattttgaaattgtgtagcaactgggtcctttatttttaaaatatatttacaagcaatactacccaattttgaatccccagccttaaggacacatgtacagttttttatccagtgacccgaggacaggtcacacttcatcagactggacgtattatgtgctgaccagatccaggcctgctgaatcaattagaagaggcataaactgaaatctaggctgtgactgactggaatgaaaactcagacattggacctgttatttagtttagtgcacacccttgatcttcagctgtcagagcaacttggggcattgtgcattttttatgatttaacaaatattagcaggtctgaagacaaaattcttttaagcaaagggaatatttcttcaaaattcaaatgacctcatgaactaaatgcctagactctaatcttattattatccctgggatatttcaccataaaaatagcaaaatggaaatctagtatttcatggtcatatgttaaatataacatacacggctttaatgtgcatgacaagtctacaatcatctaaagcacatgtatgtataacaattccaagccacacaactagacattactgtacagtttagaattttaccttttttttccggagtatgtattgagcacaaatttaacaactcatggagtcacaaaccacaaccttgtacatacaataacaagagctagagatctgtttcccttctgtttctgggattaattccttggaatttggaacatcaaagcaaataaagtttagagagaaaagagaacacataagtgctaccatctgtgacccatgtcactatcacagcacttgggtagctacagtgaggaaagaaagcatgaattcacagtgcactcaagcaggtcttcctgttacattgatcccctgtgtgtagttaaggctacaaggaatgcatccccatttgcctctgtgttttttcctcagtaataataataacaaactcctcaaacattatttgccaagatatacattcatccaaagaaaatgattttagaaaatggtgttctattcaatgagtataattagaagcacaaagcacccaagccttttacaaatccctctccaatattgttgaaatgtcaaaataggaactgctgacattcatggattattgggtcactgtgtctaagtggaaaagatagaattggaaaaggcaatgtaattatgtttgtccacagcattttatattctcaggagtgttttaacgtatttcactgtatttagctatggcaacaactccatatcataatttatttatcatcacacacacaaagacttctctgcatagcagtttcttcccctgtactcaacctgccttgcttttctgcttttccacatacagcaatgggaaagcactcaagtatgacctgtcaggccactcacaaggaatccacttctgtgcatccgaattccagaccaagggtgaaatgtcagcaatttaaattgatccctactgtgattatctgaacatcccatgtccagtcacagaggtagaatacccattacaggctgagacccatactgtgtctgttaaaatatacccctgaataattcttcacatgcaaactcacatacataacacatatacatttgtgtgtacatgtgatcattattaatattgcaaactcaaaagcaccaaataagcagcatcagggtcactatgacacaaaatattttttttatcccctgctggaaaagaggtcttttgaactgggtgttttaccatttgttaaaaaaacttaaacaagaattttaatgtgagccaggtgttggtggctcgcgcccttaatcccagcactctggaggcagaggcaggtggatctctgtgagtttgagaccagcctggtctacaagagttagttccaggacagcctccaaagccacagagaaaccctgtctcaaaaaaaaaaaaacaaaacaaaaagaacaaacaaacaaacaaacaaagaattttaatctgaagtttgtctaagtgctggcttcacctaaaactacaagcattagtagctagcccattcaaaggccttgacaaatttccagaagttcaaaagtaatttcaatatttaattcttcatctaaatgaataagcatgaaatgaatatcaaacacccacagctttatgaataatttcacccgaaaggttttcacttgggcagagactgccccaggcatcctggttccaggcatttaaaactttctcttgagtcatcatgcatgtggctttcctggagtgcaagtatgtgtcacatataggtacattcacacctaaaaacctagatgtacatgttgatttacatagggcttgaggtatcctctggaggaaaaattaataaaacttagggatgtatttctaagtacttcctgagccctctaggtctgggaaagagccagatgtccctgcagtttcagaagcaaagacagctgggctaacagaaagactttcgtgtcaaaaaaacactccccaccaagtccacaggcagccctgggtgtccttcagaatataagaggtgggagggaggagttaagagcaactgaggaaggattgcattgtcacaagattctgaaagtttagcaatttaatgatgtcatctctcctaacactaaagactgctcattccttccaaccaaacaagtgctctgctgttgaagaagtgagttgatcaacctagagagccagttaagatgaagttcaaggaagacatgcttatactgagtttcataatgtttctatagttttcaatcattcctctgtgcaattgcattgttgtgagctgtggcagaactttaagaacattctactcaatgagtaagccccttgtcatgacactaaaggtagatctcctggtccactcacaatgcgaacaagttttatagcacctggatccagaaacacagagggtaaaaaataacggaaaacatgaagtttgcagaggcaaaagctagattgtggaaaagtttaccaatcaccagacaaatgtataaattggggttctctagaggaacagaacagacagaatcattatatgtatggggtttattagggtgacttacaggtcgtggacctgctagttcaacaatgactgccactcaaagaaagttcaagaatccgtagttgttcagtccatgaggctgggtgtctcagctgatcttcagtacatgatggaaacctgaagaagtgggcttagtgacagtgagaatgagggcaagcagacaaaaagcaaaggcttctttcttcctggtcctttatgaggctgccacaaaaagatgtgacccacatttagggtaggtcttctgccctcatctgatctagatttaaggtaagtcttccaacctcaaaagatccagataaaggtggatctcctgacctcttgtgatattagtttaaggtgtgtcttcttacctccaatgatcaaattaactaagaatctcccacaggtatgatatctcttgagtttttagttagttccagatgtagtcaatttgactaccaagaatagccactacttagctcctgcccggtggcctcttcccatagctgtcgctggctccaaaagccagttctttctctggtgcttcaggcttgggtggcaatggcagtgttctggaccgtcctatgctcaccttatagtcttctcatgcaggtttaactcttttctaatcaacatttgaaatccctctccatcttgaccttcttgaggtcaaataaataggttgagaattttcacccaaactgtggcacccgtcaaaaccatatggggttggatagaccaggaaatgtctatatacaaaatctacataaaaaaatgaagaaatttctacaaaccaaaaggaaaaggggggatctcaaatgctcaaatgtacttggatttctgcttaatctacaaattttctcaattcacccctctacagtgagctctcctgccagctgaaagctgagggcaagtcccacattcctggaacaaggacttgagctctggaaagcccctgacaatctcatctctctacccattctctctatttgtgctctgctacaaatgcccactatgagaaagactacaatttaggggcttgaacttatgtgagcaaggctgaacaatgaagcaactgggtggggcttgcttatgtccttctgttcagttacacaaaatcgttcatctctttcctttcacatttttccagttccaacttcctgtgattatgcaaataagattaaaagataaaatatatagggcttacattttaccttcaaataaacaaacaaacaaaaaagagtatgtcacatgctagactggaagtatactaaggtgttcattacttgtctgaaattcaaagttagctgggcactttttatttatatgtttttatcatgtctgtttttatcatggagataaattttaggattagagatctactaattcatcatcccacatgtaattcagaagtgaccagtgaggagaggagaaagtccttgatatgaaataaaactgaaattctgaagtagcctgcagcaaactgcaattatctccaagaaagagtgactgtaaatctaagtgtgccacaaatctcattaaagggtgacacagagagaaagaaaagaaagttcatgcttttgagtgcttccagttttaggtgttctcaaaatacagcaaattgtggacaccatgataaccaaatgcaagcacagattgtcattaattcaataacagatacatcaccctccttgtgcatcaataactataaacctatgagcagatgcaatgaaatttggaaaaacagccatgacattctttgaggacagatgcaaaatttttgatatgaattcagatacacacccaagaaccaagatagtttcggaaataaggcctctcaccctctttttcaaggctgccttctggacacagacctatgactaaatgttcaagtggggatcttgtgtctactgccttcatggactgtgctgaagatgctgatgttgctgtagtctctaaggtgcttttgtgaaacatggatgtgtatggagtgatatttaaataccagttctgtcaccattgtgtttttaaactaaatatcattttaaataatgaagaaaaagatggaggagaagacatagtgtataacttggaagctttctctgaagaatttggtaacagcatcaaaacaaaaataaaaacaaaacaaataacaaaaaacaggctcattgcctataacagctataacaggagatgtctaagccttttgtgacaaaaaaaagtatgtaaaaaatcctggatctgccccaagagataaaatttttggttcttgattagaatgagtcactgagaggactaaagattggtatctaaagtaagagaaatactcttttcctctatgcctcagggaatgtcatgagctaaagatgcctataataaaattccatatggaagatcaagagatgtccatattcataacttttttaaaaaacaaaagtcaatgcaaagaaattccccacaggattctcatgttttgatgacttgatctaaaaaatttttagaaatcattcaaaggttgtaaaattaagccaatggacaaaagtcactactgtagtcagagttgatatttctgaaggcaaacacaaggtgcatgaataatagacactgacagttatggattgaatgcttataggatggtttcaatatgtccaccaaaaactatatgctgggcagtatttcccaaagtatccacattgggagttttatatttacaccaaaaactatatgctgggcagtatttcccaaagtatccacattgggatatgggacctgttgagaagtgactagcctataacgattctgtcaccacaacttgattaacgtcctattagtgaaagtggggtcacatgaaatagcatgtatggcaatgcacctctccctttcttctctgtgatagtcttaacttctgccaggaccataacttagtacacttcagtgaattgcaaattatccagccaatagtattttgttacaacatcacagaatggataaaggcaatttgttttttacctcccccaaaatttcttcttcaactgtatcccctaatgtgatggcatcaggaaacagacctttgtaagggagtgaattgtggatgaggtcatgagagtagggcctatgagaataatgtgctcacagagtgtcaccagagtttcctatcttcacagcatgattcagcaagtcacagcagggaagatgccacttaccagccatgacatagttctttatcaagaccttaatctaccagtactttaatcttagactttccagacccccaactatgagaaattaatatctgatgttaaggcatctagcacttctactagaagcccaaggtgtcccctattctggggttaattaagttaatttgggaaaatgaaaagaaagtcaaagtcactgaagaaagacaaaagggttgaaacatttacaatcatggaaatttctgttcaagattttgtaaaacatggctgctctttggaacagtgttcatttgataatgtcaaggtgtcttagttagggtttactattgctatgaagagacgtcatgaccatggcaattcttataaaggaaacatctaactgtggtggttcacttacagttcagaggttcagtccatcatggtgtcatacaggcaggaatagcactggagaaaaagctaactttcctacattttgcagacaacaggaagtcaactgtgacatgaaataaagcttaagaaaaagacctcaaagcccatcctcacagtaacacacagaaggtatggcccaaattaaaagtgtgccctccagcctcaaggtctggttaaaggcaagtgtcatccagcttcctccaacaatgccacacctcctaatagtgccactccctaagagtttgtggaggccaaatacattcaaactaccactcaaaccctaaaagcaagcaaatttagtcatgctacactgtctcctgcctgagtagtgcttgaaatctgattgtactttggtaggtgttgagctcttggaccagtaggattctaccagaaataaggtgtaatgtggaaagtataacttgtaagaacatagagaaaactgttttcataagtaatcaagaaaatgttatccaagaatgaaataagttagtcaccagcagattagaaaaacaatgcaggtttatagaacagcgcataaaggaattcaagtcagaaagaaatcggcaagtttgacctatcaagtagagatgttcagctagaacatgttgagaaagcaagttgtggaaaagaagttaaagtggggaccagtgaaatggcttagcaactaaaggatctgagtaggaaccacatagtgggaaagagaattgacacctgagaattgtcctctgacttccacacgtatgctgtatgctgtggtgggcatggcacatgctacatacactcagaaaagaataaaagtaaaaacctattcttgagaaagaaattgagtctttgttattaagaggaaaacagatcagtgaatgaaagtgattggtttaaagaatgaatgattgcattccacatgtcaggtaatttgagggagaaaggttgctttaggtacagagaacagtggtactgttacaaaggaaaggaaataaaataaatcctcagaacctccccaaaagaaaaaaacaagtaacacattaagtcttgtagaaaacagtgtggttgtggacacaaacataggattgttaggtttaaaagctcatgaggctacacgtgaagaaagagacacacttctactgtcagaagaaacccagtccccacatttgaaatgtaacaggacaaaataaagcatctttgttctcagctttgaaagtccaaaatcatccctgaagaccagggctgtggaatatcctgtgctgcttcaatcttttagtggctctaccttcttgttcctaagaagagtatactagttagggttttatagtggttgtggctcaactagtccaacaatggctatgtaccaataaaaagtccaaaagtataattattgttgaatccaagagactgtatgtctcatctggtcttcagtgtagaatataatcccaaagaagtagactctaatgccagtgaagtattggacttgctagcaaggcatgagcaagtttccttcttctacgtcctttccataggctgccaacagaaggtgtggttcagattaaaggtgtatcttccacctcaaagacctggactagaagctggccttctcacttaaaattatttaataataaaaaaaatccttcaaagttgtacctggacattttgggttttaactaattccatatgtaatcaagtagacaacctagaatagccatcacaagtccacctcttgtcaacttgacacacaatcatatctccttctgtaatgcttaatttccaaatgaaaacaataaccaggtcataattaggcctaacataataaaactatcacatgtacaactgcaaatgcattataaatttagaagaggttacaatgtcccttgaggcacattcttttgatatctcaaccttaaatatggtaaccaccaatattctcttaattgatgtttcactacatgaaccaaacatgactgaccaaaataaataaataaacaaagtcaatgaaatgattcctaatgaattgattttgctgtactcacagatcagtgctgagtccaatcatcatcagagacacttcattcaccaactgatgggagcagatgctgagacccacagccaaacataataggccccaagtcttcattgggctcctcctcttagagctcaggaaaccctgagggagaaggaaaggaggaactgtgggggctcacagagactggagcagcaaccacagcacctgcatgggtctatgctaggtcctctccatatgtgttatggctattggcttggtgttgttagatgactcctgaaggtggaagtcagagtgtcacttttgcctgctcttgggacccttttcctcttattagattgccttgtccagccctcatatgaggatttgtgcctggtattattatatcttgatgtgccctgttcagacaactgtactggcctgtccctggggttctgacagcatatgcccagctgcagccactaagatcaccacctggcctgcccacctcccatttctctctctctctctctctctctctctctctctctctctctctctgcctatctctttgtctctcctttctcccccctcctcaagtccctcttctctcctgctgctcctgtccccagagactggtctcccttatcccctcccccactttctcatttactttcccctaattaaaacacacacacacacacacacacacacacacacacacacacaccactcaagctctgttgaatggcatctttttctcatatgccgattttttacattacaacaatgtcccttggagacctgctctttttgtgggggagggaagaaactgaggatagatgtgggtgtgggcaagaggagaggtattgggactggaaggagtggagggaggagaagtacagtcaggatatatcgtatgagacaagaacaaataaaaatctttttttcaaaaagaaatcaatcaaggaaagagaacacaaatatcggtacaaacgcattttttaacgaaatgccccagaaatactcatgttggttgtataatctttgtttctgtaactgctcacattacctcagctggtatttatagctagctttctctactatccattctgtatttcctccaccttctgcaagtacctcagcaggtcttgactctttcctggtgtagtgacccataccttcattctggaagggtccatgccctttgtcatcctgctgttgtagtttctcaatgactttaatcacaggacatggtaactccaagggatgccttaaaggatctcttgtactccattcataatctttcttacttccattgtgaagaagcaatccaatttcccctttgtaatctggatcaatcactcttctaatactgtcattcctttcttagtgtgttggcttaagggcatcagaagcccaaagtagcctgagggaagtcttagcttccagttcaatagattatttgttgtagctcctggcaggagctcactccactctggaaccaaaacttctaggccaacagaacttaaggtcacaggaacaggaagcaaaaattttcctagtgagtcactaggggtcatatgagtgaaattatttttctcttttccaccgcttgcttcctggattattaaaaatgaacattgaacataattaataaactggctcacaaaggaactaattatatccttataggagaagattatcagtctttatatcacattacacaatccttcactaattggaaactctatttttaaaagtatatttactgctagtgtgtgagagtgcatggtgtatgtatgcacacatgtgccacatgcatgtgtggaggccagaggacggttttgtagaatcagttctctcgcattttacatgcactgtaggaatcaggtctgtagtcctatgtggcaagcacttttacccaccaagccatgtcaccagcctctcatgaaaagtttttgttttcaattttgttgtatttagtatggtatgctttcaaatttcaaaagaaatacctgctgattttgacatagaaaataaatattgtaaaaaaaaaaacaatgcttacattctcatcgccttcttcaagtttaaataactaatatttgtaactgtaaaaattcagttattcaagtatgttaaattttgattgctggagcatcagaggaaggcacacttccaccaggaggagcatttaccagaagctctgctctccttgtgcctgaaggagccatcaatggagccacagcccccaactataccaatcggagaaagagagaacccctgaaccacaagttccacctataacaattagaggaagagatgtatagacaacaaggtaagaacatactcaacaatataaagagcaatatgacaccaatagaaactaggtgctacaacagcaagacctgataaaaagcagaagaaaacagcctaaaaaatgactttatgaggatgactgagttccttaaagaggaaatgaaaaatgcccttaaagaaatagaggaaaaaaacaaacaaaaaattggaaaatgtcaacaaatctcttaaagaaaaccaagaaaaagtaatcaaagaggtgaaggaaattattcaagacatggaatctgaaatagaggcaataaagaaaacacatactgagggaattctagaaatggaaaatctgggtaaatgaccaggaaccacaaatgtaagtacaaacaacagaatacaagagatggaagagagaatttcaggcactcaagatacgatagaggaaatagactcattgttcaaagaaaaatttaaatccaacaattccctaacataaaacattcaggaaattgacaaaaacctaacccaagaataatacagttggaaggaggagaaatccaactcaaaaacagaaaatatattcaacaaaatcatagaagaaaactttcccaacctaaagaagaacatgcctatgaaaatacaagtggttgctgggcattggcggtgcacacctttaatctcatcactcaggaggcagaggcaggcagatctttgtaagttcatagccagcctggtctacagagcaagttccaggacaggctccaaagcaatacagggaaatcctgtcttgaaaacaaaacaaaaaagaaaatacaagaggcttacagaacaccaaatagactggaccaaaaaaaaaaagtcccctcaccaagaaataatcaaaataataaacatacagaataaagaaagaatattaaaagctgtaaaggagaaagacaaaataacatataaagacagacctatcagaattatacctgacttctcagtggaaacaatgagagccagaaggtcctggttagttgttatgcaaacactaagggaccatggttgtcagcgcagactactttactcaggaaagttttcaatagccttagatggagaaaacatgatattcatgaaaaacaaaaacaaaaacaaatttaaacaatacttatccacaaacccaatcctacagaaagtactagaaggaaaatgccaatccaaggaaatcacttatgttcacaagaacacaggaaatagatgaatttacagcagcaaataacaaagacaggaattgaacacaaaatgccactaccaacaataaaaactaagatagcagaaattagcagtcactggtcgttaatatccattaatataaatggtcttgattcacatataaaaaaggacaggctaacagattggatatgaaaacagaatcaatccttctgatgcatacaagaaacacacatcaaattcacagaaatatcaccctttacaaaagccacacacaaaaaaaatatcttgggctaacgctaaccaaacaagtgaaagatctatatgacaagaactttaagtcttgaaaggaagaaattaaagaagataccagaaaattgaaagatctcccatgctcttggatcactaggatcaccatagtctaaacagcaatcttaccaaaagcaatctacagattcaatgcaattcccatcaaaatcccagcacaatttttcacagaccttgaaagaataatactcagcttcatatgggaaaaacaaaaaactcaggataaccacaacaatcatgtacaataaaggaatatctgggagcatcaccatcccttacttcaatctctactatagagctatagtaatgaaaacagcttggtattggcataaaaacagagaggtgtaccaatggaatcaaatcaaagaccccattatcaacccacacacttatgaacacctaattttttgacaaataagctgaaaatataaaatagaaaaaagaaaacatatttaacaaatggtgctggtataactaactggctatcaacatgtaaaagaatgcaaatagatccatatctatccccatgcagagaactcaagtccaaatggatataatacatcctcactaaacctcacagaagagaaagtgtatagtacatttgaatacataggcacagaagaccttcgtaaataaaacaccagtaacaaagacactgaaagcaacaattaataaatgggacctcctgaaactgagaagcttctgtaaagaaaagaatatagtcaacaagacaaaatggctccctatagaatgggaaaagatcttcaccaaccccacatctgacagaggactgatctccaaaatatacaaagaactcaagaaactgaacatcaaactaccaaataacccaatttaaaaatgggggaacagatctaaacagaattctcaacagaacaatctcaaatggtagaaagacacttagtcatcagggaaatacaaatcaaaaccactctgagattccatcttacaccaatcagaatagctaatatcaaaaacaccaatggcagcttatgctggagaggatgtggagaaaagggaacatcccttcattgctggtgagggtacaaacttgtacagccactgtggaaatcagtatggcacttgctcagaaaattagggatcaccctacctcaagaccctgtaataccactgttgggcatatacccaaaggacacacattcacaccacaaggacatttgctcaactgtcttcatagcatattatttgtaatagtcacatcttgaaaacaacttagatgtccctcaactgaagaatggataaagaatatatggcatatttacacaatggagtactactcattggtaagacatcctaaaagtcgcaggaaaatggacagaattagaaaaaaaaacatcctgagtggggtaacccaaaaccagaaagaaaaatatagtgtgtactcactcataagtggataccagacagaaagcaaaagatacctatcctacaatcctcaaacccagagaagctagaatcctcttccagaaacagattgaaacagatgcagaaatccacaactaaccaatggttcaagctcctggagtacaatcaaagtgagggaggagcaaaaatatgaacaaagtagtcaataccatgatggggaaacccacagctgacacaagctagtgagagatcactgactcaggtctaacaaatggggaaccagcataagaccaaaccagactcccttaatataggtgacaatggtgtgactgggaaaacatatgaggccactggcagtgggtccaatgcacaaactaatgcacaaactgacttaatggagcccattctatatggagagataccttgcccagcctagacagaggagtgtgggggtggagaggttccttcgacctgcctcaaggagatgagggggaacacctagtagacttcctaggagaggcctaaccttctcttaaggagcagatgggaggtagggggagcagtaggagaggagggagtgggaactggaattggaatgtaaaaagtaattattaaaaaattttgattgctagcatagactcactattgtacaataatctttgtgatgatatctgtgactttaagttacattttaatgagacttggagaaaacatatgaaataatatggttgaaataatttagtgtttttaatgaagaaacatcacagtgtcaaacataagcaaatgtgtgaaattatctttttatttttaagtgtgaatgttgaaattcaggggtcatctacatggttaagcaactccagaagttggaaaacctaaacctttataactgaaactgtaaataaccattatgaattactcagagatatgctgagaaatgcctaaaagacatctctttaatctagtctaggaaaagagtaactctcatcacaataaaacaaaatgaatgctgaaaacgtcatttatatatctttgaattcttaaaaaaatttggtgtggttttatgactaataaatagcaataaattaacccaaatataagtatacatcactataagtgtttgttatttagtttggaatttgtataatagggttgtgaatgagcaagtgttcgggattgctaagttgactaagttgacctttggtgatatgatttatctgaaatggttacactaaaacactaagcttctttgtttttctactacacaaattactctacaggtaggagccatagcttatcttagtctcagaacctgatacctcagcatgctcaacaccactttcagagtgaacctggactgttcaaagaagttctgggcttggggatggctcagtgggtaaatcctcctatcatattaattgaccctgatcccatctgcataagtcatgaagcagaaaaataacacattatcttataaataaaatgcactgctgatatacactaccattaagttgatgctccaaaaatatcgaatgttgtccatccattctttagttgagggacatctaggttgcttccagtttctggctattacaaacaatgctgctatgaacatggttgaacagatgttcttgtatgaatgggcatcttttgggcatatgccaaagagtggaattgcaggatcatgtggtagattaattaccattttcctgaggaaccaccatagggttgctcatggaccccagactgatagctgggaaaccacataggactgttccagaccccctgaaggaggaagtcagtttggaggtctggacaatctatggggccactggtagtggatcagtatttacccctagtacacaaatgaactttgggagccctctccacatagagggatactctctcagcctagacacactggggagggtctaagccctgctccaaatgatatcatagactttgaagattcccccatggaaggcctcaccctccctggggaagcagaaaggggtcaggatagggggtcggtggggggcaggggaggagaagagggagagggaactgagattgatgtgtaaaagaagcttgtttctaatttaaataaaaaagaaaaaatcgaatgttgtcttcgtatacagtgtgtgacaacacctgaaaattctgtcacctccaccctaccacatataatccatcactctgctatataaacagctatgcttctctctctcataaaacaacataagtgtgccaggaatgatatcaataattcttaacagaacattcctaaaccatggacatgatttactttgcagggggcggggcctgggaaaaagcatgtgctaggagtttcctggcttatttctgcccctaaaccatttctttcctaccggatccacccttgtgtgactcactgttaaagagcttcactagtctctccaagtatcgatgtcctggcttaccacctgaaactgaactcacataagacttcctgtttaaggatgcatctggagtgcatgcaccaatcctagccagatcctcatgtctgggaagactctagttctgcctgttctgcttcttacaatgctgttaaagcttcattaagtgttggctgaacaactgatgcctaagaagtacatggagtccaaaaacaccattaacaagtgagactaggccttcccattctccacatggctaacatcttttggtaaggtgttttttttttttttccttctaatccaccaatccacctgcctactgatgtgcatacataagattctgtttactgtacttcccccccttattttaaaggcaatatgaagtacaaggtaagttattgctttgtgttgatttttgctacaggcatgtcattgttcttttactctctgaataaataagtcaccacttattttttgttaccagattttaataaaaacaaatgtacaaaacacttgagttctcttacatgctgactgatgggatgctttctgggtttttactctttaagaaatgacttcttgtaagttaggaaagttgtttttcagaccatttaactatacaccaaaattgagcttttaatttccaaaagtatcctcatagtaataggaagcttgtgttaaacaaatgtaagcaaaatttatctaatatctaataaaacttaattaaacattgttattgaatgacttttgtatgaaacaaaataccaggcatcgtggggcaaagaaaaatacatgggataatctgtctagtttcagaagttcagagattacaaagggttcaagacagctactagaaaggataagattagttatgatagtttcacacaatacgcaaagacctcctctgttaagaaaaagctataaacatgcaaattattaagaaaagaaaagcaactgaatgtgaaaacattgagtcaaaataatgcaattagtcaaaaagtacctcaaatgcatattttcctttcaaatgtcaaaaaattattttaattatcacacctaaggttatatgacgattatgctatagtaatatagtaagttttttaaaacatttttataggtattttttatgagtgttttgcccgaatacatatctatgtaccacagacatgcctggtgttcatggaggccagaagaaggcattggataccttagggctatagttacaaatggttgtgagtcactatgcaggggctgggaatctaacccaggtcctccaaaagatcacccagtgttcttaaccactgagccatctctctagtcctccttaacttaacaagttaagctttgctgttaaattaggactggaaatataaatataaaatcctgcaaataaaatagagagtaattactaattcaaatgcattagcactgggtgagtggtcaattaaataactaattatcttgaaaaattaactgactgcttaagtggattgccacaccccacctatcttttctcaggccccacaagtgtcccagagctcccatacttctcaactgactcagtggtcttatttaatagcttaaacactctctctctctctctctctctctctctctctctcacacacacacacacacacacaatcttaactattcagttgattatctttttattctataagcacagaacaaatgttaattttgggccagggactatgttagcatttataaaaataaaaaacaaagataattactcatcagccaattaatcttcctttcctctctgcttgcccccaaatctaacatattgcttggctatggaagtgcttggatgaacctattccttctacttaaacatagtcctaggatggcacattaaaggaaaaaatggaattctcttgagatttgtcaactgtgggttgcacctgataatttggaatgttagccctaaagtttgagaaatacactagaaggtgaattttagctactgtgatggtaaacctttataatatattgagaataaatgtgttgtgagtcatttctatatcatttccacttctagaaatgcctgacctaaaagaggaattccagaacagctttcagtatttagatatagtctatacacagcaatgaaaattaattttctcttaaaacttcccttattcaacagaacagctttatagtaattggtcttttagtaaatagaaaagtgtctgcatcaagaagtggggatgaggaggcaggagtgacagtaggtgacctaaaatagaatttagagtgaaagacacaggcagtgacccactacttgtgatcatcactgtcaggaataatcagaaatgtcaaggtgtatagggtagtcttgaaatgtttatttatttatctccttaaaatttaaattagaaacaagcttgttttacatgtcaatcccagttccctctccctcccctcctcccctgcccctcaccaaccctttatcccatccttttcctgctccccagggagggtgaggcctttcataggggatcttcagagtctgtcataccatttggagcagggcccagaccctacccagtgtgtctaggctgagagagtatctctctatgtggagtgggctcccaaagtccagtcctgtactagggatagatactgattaattcgcatttccctgatggctaaggatgttgaacactctcatcaaaacaccaaataatccaattagggtacagaatagagaattctcaacagaggaatctaaaatggccaaaggacacacaagaactgttttgacatgagaagagcttcagagacctgacaactttcagcttgttattgtgaccctgatcctttatgcacatcattcttatgtagctcacagtgacctctttcagtggaatgtgaccgcatacatgttcatctttatattctttctgaactgagctcagcatgttctagagtaggagaatcaggaggggatgattttgactcgtcatgagaaacaatagaatataagccaaagctaaataaatgacttgtttattatgtgagtgtctctgactgtatgtaattgatttccgtttgtgaacctgcaatctacaaaattgactgttttaacaagatgtgctgactggtgatatgctacagtagcataagtgttatggaagtaactaaccattttctgattggatagaaagtctgctccatgtgatgggacccatacctggcacaggtaaaggtgccgaaaacatgtagctagaacatgtagcgttctaagcaacaactccatactaatattttgctaaactgacatcagtattaaaatgactcctaattaatgactcgatgatatacttatagttcagagcatctcccagaccttattagagaaggttctccttgaattcgatggcaattaataccaatattttgtgttcaactagtcagtgtgcagagaacaacaaactgtgaaatgctgagacttaataggatatacatatatcacactcctccaactcaagacccaagactcccatcctgggaagactctaagagccagaaatgataagtaacatcaaagaaacatttttgagcaggattgtggtagtgcacgcctttaatcccagcacttatgaggcagagataggcggatctctgtgagttcaaggccagcctgatctacgggaaaagttccaggacagtttccaaagctacagagaagccctgtctcaaaaaacaaacaagaaaagaaacattttttttccagacacaaccagaaagctgaacaggagccagtggttatgacaacatgtacaagacctgaataaacttaacagacaaaatcctagtgtaacatggaaaaaaaggtgtgcacaaaatcccaccactagccaaagagctatttgtattttaaagctagtaggagaaagtgagtgttctttaatgatacaactctgtaggttggccacactctagggcaggctccattcccaagtctacttgggcaacacaagtggactcaagggaagaaaaaacaaaaagaagaaaaatcaaagttgggaatgaatatgttaaaattacattttatgaaattctcaacagattaatcaaaccattgttttagaaaatcatccaattacagagtccttctatatcacaccctcttcctctatcataatgtctatcatttctccatgatagacattatcttcttcttgctgtctattcattgacatgaattgagggtcattaactattttattgactccttattataagtacctgaagaaatgttgagtcaatcaattttaatatcagaaagttctctgctatcttctgatagtttctcattcattcaagagcaaaccataatcagaattagtaccaaaaatgtttgtggtgtttgaatatagcaacatgattctctaaaccttgttattgaactcttgccatttatgattataatgtataaggtaaaatgattttactctatagagtaaaaaataatggctgtttatatttctgcaccctctcaaatgcaaactatagagccaaaaactgtgggccaaaacctgacacaggtgaagaaattaaatagggaaaggaacagaacctcatgttcattaaaatggtttttttgttagcaaactgtaattattctaaaagaggaaattattcatcagtctgtaacttgatcctgcataattcaaaaatatattatatattaaaatttaaaataacatatatgttatgtgtcatatgtataaggcttgaatatgcatacttatgaaagcatatgtatatatagtaattaatatgtatatgggtgagttatatatgtaccacatcaaaaactgaaaattcaaaacaaacaatacctagaagagggaaataattatagttcacagagcactctgttctctgagctgtgctggtattatccacaattgtgtaacaattctgtacagtagatcttgctttcttattatttgaaaagcaaaagcaacagagatattaacttgttccattaagctgaagttttcagaggacatttgggctccttctgaacttatggttgttattaatccatttaagattaatgaatttaattgaactatcactacattcaggtatggcataggagtttagcaggcaataaaagagactatgaacctgacagaaataaatgattggatcaataaataagtggaaaaagaggcaagtcactcataaattaattctgaatagcttatataagtattccgtattttgaggactggagaatattttcttagccctagattgtaggctaagtttattggcttagcagttttctagcaagaaatagagtttataaagggaagagaggaggcacaataactttacagaagggaaaccaaccctcactacctcaacaggtgagcattgataatgttagccatgtagacagcatgtgcacctgacaggccataaggagaatggcatctcatctcttcattccccttcctaaaataaataggcaagtctgatcatgaaaaagtacatctaacatccaacgtgtactcctcaaaaccataacggtcatcaaagtcaggaacatccacatagaaagacgaaaaactgtgagaacatctgtaatgttatgccctggatgagatcctggggaaaatataagacattaggcagtaattagtgaattctgtctaagagtggagttgagttgataatgtaagagtgttggtttcttggttgtgacaaatacgccatagtaatgtgaaatgttaccattgaggaaaatggggaaagggatagatagaaattctatcttgcaagtttctatctagcgattctaaaaccaaaaattaaatacatacatgcacacacatatattcagtatcttggacaagaatataaaacagctatatttccattcctggccaagtacctttattgactgcctctccaagtgttataaaatgtacatcctctcccaacacaaacacacaaaatattcagacttgaagcatgaagatagtgtttaaacttggaagagtcagagtgagtctactggctaagctgaagagattggagatcataattatgcggatgaaggatggtggctctcctaatttcaggcctggatgagagcttctgaatgttccttcctctgtaaaagaaaaggttcattaagaatctgttacttgaggtgaaactcagaagaaattacgcagaagacactgggagtagactaaactagggaagccatgggagtggtaaaacacaggaaagcagttacaaaagatcccttggggctcagggaaggaaaagttactctgctcagtggaatgtgatggaatgaccctgggagcaaatccctactgaggccacacaggcactgatggcactgtcgtctctcaggtaccatatgggcatggtagagcagatttatgagggttttctggtgttaattaaatctctccctacagcctgtgttaacaacatttgcttgttaggatgtgtatttctcccctctgagacaaactggtggttggttttgttaatcctttcatagtgcaaacttgtactctatgtctctgaagtcttgaatgtaagcatgcaggtataattctggatttgagtgaagcccaaacaaggaaatggggacttcgggaagcagcaccatgaggcatacacttgatttttacctttcttattttttgtgtcttgccatatctgcactgaactaaagaactgatttagaaaaataaggtggttttttttttttgttttcaaaataagatgtcttttttttttttaaagaaccaagagacacattttttttctttaagaaccaagagacacatacttttgaggcaaaataaaaaatatatatctttctcctgggctctgatcatttacagctcttacttatgattgctttccccaggtgtaataatttattgcctattagttcagtatatcaaaggctcgctttctctctttgactgcatgggtgactccattagtggtaatgaactgtttcatgggtaatcacaccttcaagacccatccacctaaaccctaaagcctgaaacctcagctgtttgtcctgcagagagaaaaagagcaatgacctgcaaaaagagatctgagaacctctggagatattaagtttaagcttaatagtaagtcattaataaataagatgcagcacaattatcaatatgaagcacatttaataattaataccttgcaaacaaaagagaaatgaaatactaggtggaattaggcagaggttatattcagttccccttgaagagcctgctttgaaaggaaattcacaaactgtttaaaactatgaaagaaccatttccgcaaagctccagtggagagccactttgcaattgctattctgaacactagcttacctctgggctcacacatattctctgtgctccattctaaaggtacaacttctcccttttagtcacaactttctctctttcaaggaagtaccaaaagttcaggtggatgtgtgtgatcaataaaataaataaataaataaagtccttaatatggctgtaattcttactatcttggatttttagggtagtgtttgttgaccataagatgaagcaaccaacatttattatttaccaaggtagtttgactaccatagtgggtatgtcatggaattctctaaataaacctgtatggccactttcattaagtgctgttcatagactagaggtttcaggttgagataatctaaggcacttgcctaagattaacagtgtggatagtgagttctgagaaattcatttctggtcttcggaggcctaagaatatcatccttggactcccaagtgactatatctaaagtaatacatttatttaagtattattttttaatcaattgcccacaacatctggcagctatgctatcagttgtctggagactaaaaacagtaagacttcccaagtcatgattcagaaaggcttagctactctctggcattgctagccaatcaagtcttccagcgttgctcatgagcctggccttttcgccagcctgtggctttttgcaggagccactcaactctattgaaaggttgactgacagtgtcttcccaatgctgccaccaagcaggagctgttctaacctgcagcatagtatgtgttggccttagactggaataaaaaaaagtgatacctcaggatatatgttgagtttctcagctctaatgtgtatgtgaatgctttaattccttggtcttctagatgaccaaccatttactaggccaagatctccttagaatgaactgttcagttaattctgagccacctttaccatccatgattccaggagtaaattgaactttttcttttctaccaaacatgttctggctcactgtgaatacaataggaagttcactcattccacattaaatgcattgacttatgtttgaatttcatggtctattcacaacactcatcaattccatttacattgcctaaagtttatagccaaatcctactaaaaccactctgtaagataacattaataaaaaggaaatctgttggaaactattttgcaataataaaagcattcaaacttcaaggtttgagactctttagagtgagtctttattataaacactcaataagtactagagactagaaatatggaagtttgagtcatgtaggattcttaaaatctagattataggtttatttaatacagttatatcaatgggatgtttttctattcttctctcttctatttattctctgacaatgtcatgcatgcaaataatgaatcagttatattcataccataatctccctcctacttcccacacacaacacatcattgagtccaattggtgctgcttcctggaatgctgataaatcttggcctcatcttgtgctggtaaccatagatgcagagtccacaaatgtggtggtcatgccatgtcacagcataccttccagtcctcctgatgttacattcattttttaaacagggtttctatgtgtagccttggctgtcctacacctcactcagagatccacctgcttttgcctccaagagctggtattaaaaggtgtctgccggcagtgctcaactgctgttttgatctttgtgttccctcttcaattatattccttgaacctttggaaggagttggtataggcaactaatttatagctgagcacccaatagtaacttattttcagtactgtcaccagttataagtctctgaattacttctgactactatagagagaagtttctctggccaagtttgagggcagcactaattgatgtagataaacataaatactcgagacagtttaatatcatgtctatttagcaaaacaccccaagctacaaacttttaagagcccttaaatctgaatcaaaagcagttggttactccataacatttgcaccactattgcatcatctttcctggcaggtccagcatcatagcactcagggttcactgctactggtaccactgatggttttttcccttcagcagcctgccacggcactttctgacactacgaaaactgaccagcaaaggggaatttttcaagcccagcttgattgctttatgtgctgtaaccaaaatgtcttcagattattatgttggcatctagttatgtgagcaaacaagagcaatggctagtaatggcatatttattgacaatcaaacataactttcaactgaagataaataggggagtattgctgtaggttttatcagcctaatacatttcaatgcttaagtataaatatgtagacacaatgttttatcacgaatgatttctctctaaataaagttggacaatacaaggaagtcttagagcttagaaatgccctttcaaaggccagacaattggtgccatctactataataaaaaagaagacaaacagagtcatctctggtggtatgaactcagtgtagagagtctcctgctcaaaacaaaagtaagcttggatcccctatatttgtacccttttatcagaacagccacaaaacaccatattcagcctcttccaggaaattcggtggcatctgtgttagctctagttatctctcagggttcagttcctcaaatttgcttcctaaagcaattgatggtaaatctataaagtgtacagatatacccctaacaatgatatgtccatatcagtacttatatccacagataagtgaagtctctacctctcatcatggaaattgctctttgcaacagaaggaaaccactacagaaaacctcagtgaatcaaattgtggagttgtggaactcagtcccagttgatatatctataaaacattcacactcctaaggctttgggaacatgcagaagatagggcagaaaggttgtaagaggcaggagatcaggaagtttgctgtgaaactgtttcctagtaatatcagaagctacacccatgacgtctcaccaacatgactgcccaaatgcgagctgaacaaggaagatacccacagacatgccaaaaaggatgagagaaaaccttcaaggtctcaactctatacaaagaactatcagctactgaagaagctgggagctggaaaggtggttttctccagggaagagcactccaattggttgtctagtatggtcatccctgaaaatataaatacatgtaacaaaacaagggctgaacaggttatatttaggaacatatatgtatatacatatattcatgtaataacaattaataaaagaggccatgaatttgaaggagagtggaaaggatacaaaggaagatttggagggagaaaagagaaagaaaaaatgttgtaattatactaatctaaaaaaaaatagaattagcatctaaaaatgtatgcctgtattgtaaaagtagacctatgacacaagcatgcatcttacagtttaaggtactgcaataagtccatatcacattcccttctcttacacataactgtgctttgtgaatgcagacgtgtctcctccccacataactcttctgtaacaaggactagaaacatactgctctccataaaggcctgtgggctgactactaggacaaaactaattaattctctggttttgagtgtgtgttctgcttctacagtgttgcatgaccattccattagatgtattttgtagccttacaactcaactgtgggggtttctctggtcctggtaggcaaatattctccatttcctatggatccaaaatgctacatttcgttaaaacctgtcctcaattacccccttgtccaggaagtcccactaaagctcttgtctctccatacctgtcatttcagtgatgagtatatgtcttaaaattaatgcctcacagtgttcctctgtgttctatggcagacatcttatctctgcaaaatgttaagctcccttgagggaaggggaggcaacaaacagctcctgtctggattatcatgagctttatagccaccctcaactacttttttaaaatttatttaaacacacagagagtctgtaactagactttcttagtatgtgccagtcttttctctttttaaaaagactaatttttatgcttaggaatgtttgtctgtgtgcatatatatgcaccacatgcatgcctggggttgtgaagtccagaagagggtgtcagatgccctggaattgggtggtgctgggaactgaacccaactgctttctttgtaggagcagtatgtacccttaaccactgagctgtctctccagttcctattctcccaactttaaaataaaatgttttaagaggctctcaatgcctgaggacttccaagaattttttaaaatttctcttcctaggttttcctaattcatatttagcctgagttctcttttctaaaaatctaaggagtcagacagtatgctacgtctgcctgtctttttccatagtggcaaacttatttagattaacttcatccttctgagagaacaacagtaaaagtctccacattgactctctgctaaatgctcctgctccatagacatatgcactaatgtatgcggtgatatattatttatgatttattaaagcttgcctgaggattcagaaagcaaagtcaaccacaagatataagggtcagtggtggaacacacctttaatcccaggactcaggagagaaaggcagctggatctctctgagttcaaggccacactgggctacatgatattgaatcagtctaaaagagtaacagaactcatgcctttaatcccaggactcataaaaggtatttaagacaagaacagggtctcagagctggctttcattacccagccacattgaggataggaaggtattaatttctccagccatgctgaggcttggtggagtcagtatctctatttcattctgaggtagagtaagagctagtagcccattactttgcttttctgatcttcagcttgaaacttgaaccccaatatcaatctctgggtctttatttttcatgctacagatgtatgcactgatttacatgtggacatatgtgtgacgtatgcatgtaagcagattctgtaagtcctacacagaaggagctgtctcttgagaccttagagcgacagaacatggaggtaacttttacacctagagattattctaacaactgtattttctgtttttaaatttgcagtgtagagaaaatcataaacaattttgctcttccaaaaacgattaaaattgaaatctaactaaggagttgtttttgcttgttttatcttaaagatattataagattgcaaacacatttaatataaagaaaaggaagaaaatttgagtgttcagggatggtactgggcataagcttttttttttccttttttaaattaaaatagaaacaagtttattttacatgtcaatctcagttccctctccctcccctcctcccttgccctccaccaagtccctatcccaaccctttctggtcctcaaggaggctgaggccttccatgggggaatctttaaactctgtcaactcatttggagcagggcctaggcccggccccatgtgtataggctgagagagtatccctctatgtggagtggactcccaaagtccatttgtatactaaggataaatactgatccactaccagtggccccatagattgtccagacctccaaactgatctcctccttcagggggtctagaacagtcctatgctggtttcccagctgccaatctgagcttcatgagcaaccccttgttcaggtcagctgtttctgtaggtttctccagcctggtcttgacccctttgctcatcactcctccctctctgcaaatggattccagagttcagctcagtgtttagctgtgggtctctgcttctgtttccatcagctactggatgaaggcattaggatggcatataaggtagtcatcaatctcattattggagaagcatatttaaggtagcctctcaactattgcatagattgttagttggtgtcaaccttgtagatatctgggcataagcttttaaaagcagcattagagcttattaagggagggtttttcaggctggggagatggttcagtcaacatcatagtaaaggaggacctacatttgattcccagaacccaagttaagcagtcctgtgataacatgtgcttgtaatcccagagttgggaaggcagagatgaatagattcacaagccttactggtcaatctggccagccccagttagtaagttccaggcccctgagagaccctatctagcacacagcccctatagtaaggcactcaagactgacctctgacctccacatttacttgctctctctctctctctctctctctctctctctctctctctcgctctctctctctctctctctcgctctctctctctctctctctctctctctctctctctctcacacacacacacacacacacacacacacacacacacacaaactcatatgagcacctccaccaccacccatatgcacatacatacatatagagacaggaagaaaatgctgcagtaaaaacttaagtatagacattagtggagagagatgcaagcatcagcttttcaaaggcagatgttgtgtacaaattttattgtggttttatactgttacaaccatctaagtatgacatatcactatttggatatgtgtgcatgtgtgatggtcaaatttttaatctagacaactaaacttttattttattatgtgaatacctgaagacaagtaagccctgtacaattttacctgtttcactggtttatttgtcaacaactgtatttatccaacactaatattaacagtttccctgttgcaagccttttggtggcaatagcacttacttcaaaggtaaactaatgcctttcttgaagtaattgttagctttcaatgagaaaaaaagtgaagttgcttttcaaagcacagagaaaataaatagaaatttgaagactagaatgcattgatgaaaagaataaatattggaaacagtattcttttttcagatttttaaatttgaattagaaacaagattgttttacatgacaatcccagttcccttctccctcccgtcctccgctaccaccccctaaaacactacctatcacatagcctttttgctccccctggatggtgaggccttccattgggtgtcatcagagtctatcatatcctttgggatagggcctaggcccacccctgtgtgtcttggctcagggagtattcatctatgtggaatgggctcccaaagtccacaactatgctaggaataaaaactgaactactaaaggaggtcctgtagattcccgagatttcctcaatgaaatccatgttcctggggtctggatcagtcccattctggtatcccagctatcagtctggggagcaagagttccctgatgttcaggtcagttgtttctgtgggtttcaccagcctggtctggacccctttgctcttcactcatccttctctgaatctggattccagttcagttcagccataagttgtgggtgtctgcttctacttctaccagctgctggatgagggctatccggtggcatataagtcagtcatcaatctcattatcaggggagaacatttaaggtagcctcttctctgtggcttagattgttagctagtagctactagtagctagtagctagtagctttgtggctctccagacatttgcctattgcctgatttctctgtaaacctaaaatgcctccctctattatggtttctccatttttgttatcatctattcttcccctgactcaaactttctgctcgctcatgtcctctgcatccctcctcttcttcccttctcattctcctagctccctgccccctcttcccgtgctctcaaccagctcagaggatcttgaccctttacccttctctaggggaccacgtatgtctcttttagggtcctccttgtttactagcttctctggcagtgtggattgtaggctggtaatcctttactctatgtctaaaattcgcatatgattgagtacatatcatgtttgtctttttgtgattgggttaccttgctcagaatgatttcttctagttccatccatttgcctgcaagattccattgatcttttccactgagtggtactccattgtgtaaatgtaccacattttctctatccattcttttgttgaggggcatctagactgcttccagtttctggctattacaaatagcgctgctatgaacatcgttaaacagatgtcctttttgtatgaatgtgcttcttttgagtatatgcctaagagtggaattnnnnnnnnnnnnnnnnnnnnnnnnnnnnnnnnnnnnnnnnnnnnnnnnnnnnnnnnnnnnnnnnnnnnnnnnnnnnnnnnnnnnnnnnnnnnnnnnnnnnnnnntcttttcccagtctgtgggctgtcgttttgtcttactgtgttctttgccttacagaagcttctcagtttcaggaggtcccatttattaattgttgatctcagtgtctgtgctactggtgaaatattcaggaagcagtctcctgtactttgtcttctaatatggttagtgtggccgggtatattttgaggtctttgatccattttgacttaagttttgtgcatggtgataggcttgggtctatctgtagtcttctacaagtctgcatccagttatgccagcaccatttgttgaaaatgttctctttgttccatcgtataaatttggattgtttgtcaaaaatcaggtgttcataggtgtgtgggttaatatcagggttttcaattctattcccttggtctacctgtctatttttgtgccaataccaaactgttttcaggactatagctctgtaatagagcttgaagtcagggatggtgatgcctccagaagttcctttattgtacaggtttttttgtttgtttgtttgtttttgttttgttttttggctatcctgggtcttttgtttcttcatataaagttgagtattgttctttcaaggtctgtgaagaattgtgttgggattttgatggggattacattgaatatgtagattgcttttgacaagattgccatttttcctatgttaatcctacctatccaagagcatgggagttctttccattttctggaatcttctttaatttttttctttagagagtcaaaattcttatggtacaggtctttcacttttttgnnnnnnnnnnnnnnnnnnnnnnnnnnnnnnnnnnnnnnnnnnnnnnnnnnnnnnnnnnnnnnnnnnnnnnnnnntactgttctttcaaggtctgtgaagaattgtgttgggattttgatgggcattgcatttaagatgtagattgcttttgacaagattgccatttttcctatgttaatcctacctatccaagagcatgggagatatttccattttctagtatcttctttaatttctttttgtaaagactcaaagttcttgatatataggtctttcactcctttggttagtgttacaccaagatattttttgttgtttgtgactattgtaaagggtgatgtttctctgatttcttttttcgcctcatcagtatatagtagggctacagattttttgagtttatcttgtatcctgccactttgctgaaagtgtttatcagctgtagaagttccctggtagcgttttttgggtcactcatgtagactatcatatcatctgcaaatagtgagagttcaacttcttcctttccaatttgtattcccttgatctccttttgttgtcttagtgctctagatagaacttcaaggacaatattgaagaggtatggagagagtggaaagccttgtcttgtccctgattttagaggaattgcattgagtttctctccatttaatttgatgttggctgtcagcttactgtatattgtttttattatgttgaggtatgttcctgttatccctgatttctccaagaccttagggctgttggatgttgtcaaaggcttttatggcatctagtgagatgtgggctttttttcctcagtctgtttatatggtggattacattgatggattttcatgtgttgaaccatccttgaatctctgggatgaagcctacttgatcatggtggatgatttctctgatgtgttcttggatttgatttgccagtattttattgagaatttttgcattaatattcatgagggacattggtctgtagttctctttactagttgtgcctttgtatggcttgggtatcaaggttattgaagcctaataaaaagagtttggcaatgactcttctgcttctattgtgtagaggagaattggtattagctctctatttgaggagaattggtattagctgtaccttgaatttctggtagaattctgcagtgaagccatctggcactggagtttttttggcggttataggtctatttatgttgcttatctgttcttgatttaattttggtaagtgaaatctgtccagaaaattgtccatttcctttagattttcaacttttgaggaatataggtttttgaagtatgactgatgattccctggatttcctctatgtcttttgttatgtcccccttttcattcctgattttattgatttgtatgttcactttttgctgtttggcaagtttggataaaggtttgtctatcttgttgattttctcctagaaccaactcttcattatattgtttctttgtattgttctcctagtttccattttattgatttcagccctcaatttgattatttcctagcgtctgctcctcccgggtgtattggcttctttgttttctaaagctttcagttgtgtcgttaattctctagtgaagaattctaaatttacagtatggtgctctgataagatacagggggttatttcaaatttttttgtacctgttgagttttactatgttgccaagtatgtggtagattttagagaaggttccatgtggtgctgggaagaaggtgaattgttttgtatttggatggaatgttctatggatacctgttaagtccatttgtgccataacttccattatttcctttgtttctttgttaagtttctgtctggcgttcctgtccagtggtgagagtgggttgttgacgtctcccactataattgtgtgcagttttatgtgtgatttcagttttagtaatgtttcttttacaaatgtggatgcctttgtatttggggcataaatgttcagaattgagacttcattctgatagatgtctcctgtaatgagtagaaagtgacctccttcatctcttttgatttattttaatttaaagtccaatttgttggatattagtattgttaccctcatttgtttctttggtccatttgattggaaaagctttccctaacctttaattcttaggtactgtctgtctttgaagttgaggtatgtttcttgtatgcagcagagggatgtgttctgtcttcttatctattctgctaatctgtgcctttttataggcgagttaagaccattaatgttgatggatattaatgactattgattgttcannnnnnnnnnnnnnnnnnnnnnnnnnnnnnnnnnnnnnnnnnnnnnnnnnnnnnnnnnnnnnnnnnnnnnnnnnnnnnnnnnnnnnnnnnnnnnnnnnnnnnnnnnnnnnnnnnnnnnnnnnnnnnnnnnnnnnnnnnnnnnnnnnnnnnnnnnnnnnnnnnnnnnnnnnnnnnnnnnnnnnnnnnnnnnnnnnnnnnnnnnnnnnnnnnnnnnnnnnnnnnnnnnnnnnnnnnnnnnnnnnnnnnnnnnnnnnnnnnnnnngtaccttctggctttcagagtttccatggaaaagtcaggtgtaattctgataggtttgcctttataagttacttgactttttcctttgctgctcttaatattttctctttattctgtatgtttggtgttttgattattatgtggggaggagacctttttttggttcagtctatttattgttctgtgggcttcttgtattttcattggcatgtctttctttaggttgggaaagttttcttctatgattttgttgaatatgttttctgtgcctttgagttggacttcttcaccttcttctatacctattattcttaggtttggtcttttcatggtatcccatatatcctggatattttgtgttagggatttgttggacttaagattttctttggttgatgaatctatttctgctagtgtgtcttcaactcctgagattctctcttccatcgcttgtattctgttggttatgcttacctccgtagttcctgatcatttacccagcttttctatatccagcatttcctcagattgtgctttctttattgtctatatttcagtttttaggtcttgaactgtttccttgagagatttgttgatatcttgtatttttggtgtggtttttctttcatttctttaaaggattttctcatgtcttctttgaggtcctctatcattttcatgaagatgtttttagggtcattctctttggttcatctgcattgtgatgttcaggtcttgctggtgtatggttccaagtctccgtggttgtcatattgggttttctgttgttgaatatgcttttacattgtcctcttctcatcctttcttctggtgggtgtagcaggagtctcttcctttcctggtgggtatgggaccaaagttcccttctggtaaatgcaaacagatccaatactctgatatctgtcctcttctcgtggatggggaggaactgttaccctgctcatggcagtgtccagggttgtttggatctggtgagcagatccctggcatcagatgtctctgagcagggcagccgaactgtggaaacagtattatttcatatgaactatatgacatgtttcaaaggcttgtgacatacacatacatgtatgcatgtgtcttttctggatgaaacctcttaccagcacagcatcaggaattcaatacagtcaacaaccttggcttcaggcctttctttttaggaatcttgcctgcatccccatttatagtataagacatgtctcaagccctttgtgcaattctagtaccttttggttttaccatatcagattataaccctatctaagccacctctgaagtcacccttatagtcacacttcttcaaataagagagaggggggaaagtgtcttaccagttatttgatatgggagccacctaaacaatgacttaacaatgatcttccatttagaagcccagtctacttagatatgtctttttccttccctggatatctctcttctacctttcaaaaagttcataccaaaaagctctttttaggagtgtggtttcaagagagggtttctctttgggttttgagactgtcctggaactagctcttgtagaccaggctggtctccaactcacagagatccacctgcctctgcctcccgagtgctgggattaaaggcatgggccaccacctccaggcccaaaaggctcttttaataaacccagactctgctgagctcacaccctgctctcaagtgtgcattgtcatttccccccaaatctttctttaaattttaataaactccaaatctgcttcttactttctcatcctaaaactcctttctccatcaaagctaggggaactgagtggaggcctctgaaaacatctggggctgcttccagtgacagtatggagcatgtctcttcccttcctgctactgaccaggtcatcttgtatgttctgtgtctgcctctgtgttcctggacactgatctttcttggtgctcatgactactctacaatgtcggtttattcatctgtctttaaacagttctggcactcaaccatgcctcgaactaggtatcctggcaccttcattgttgcattagatacattcagtttgagggaagggctgcattcagaaccagcttccttctccccagcaaacagcctggacttgccagctgctcccagatttgccccttacttcctagtctcctcttccatcacatttctcaggtgtctgctcactcagtggtccagtcatgcaggacttctcttttctcacgtaggctgtaattttccaccttgggtcttcgagggtcattccaattaaaatacattccatttggtatgcagtgaaaatcaaggtcaggcttaaatgctgctacctctgtgctccctgagctctttgatcataacactaatatagcacgaatcacattgtgttgtagccagtgatctgtctttcccaccacactgaaccctctaatgagcaggagccctctggtttgtctttgtaccttcagagaggttaagtgattggcttaagatcaaaacactggcaaaaaaaaaagaaaagaaaagaaaaagaaaaaaaaaacacagaccaacccttccattctgcctccaagtccagtatgctaaaaatatttcttctaaacttccttctgcttttataaagctcaagaacattttactaacattaacaatggtagcagatatatacatgtatttttattgtatcttttcaaataaaatgtctgcttcaaaaaccgcaggggaaaaacaatgtataggtaggtggtaaagtgtgaggttcttttcaggaataaccctcagtggaaacctgcctacaaactcctaaaatatcatctcctctggccatgtagcttcatttgctgacgttttctactcccaaatagattctggagcacaagacgaaggctcgtgacagttgactaagttgcctagatatccctctatgtaaagtaaacatctttgaaatatagttatatgagaccctattctagaggagaaactgcctgttaaacagtgaagaaagccagcagcaaccagtcgatgcctggtctactttctgggctgcacctttagacctcctgcacatttgctgacagcagttcaagtgctcaccagagggctcggagggcgggaggggagagaagcttactttaaggaggccaagcggcttggaatacatgcagtggcctgagcacaggtccaggagtcttaggctttcggaactgtaatcctagctcagacactgatccctcctgctcccagggataaattactcaacctttctgccttgctttccagatctttctaaataggggtaataatcttgacctcagaaggttggtgtatgaattaaacatccgtgaggcctcatcttaaaatccagcagaactaagcagactcagtaactcttttgatgtgggttaacaagaactatttctttctttctttttgtttttttgaaaattttttttcattttttttattttacttagaaagaagattattttacatgttaatcacaagaactatttctgttcaagaggtgaaagatacctgattctagcagcctccgaaaggaaggcaaattcatgaactatttctgttcaagaggtgaaagatatccaattctagcagcctccgagaagaaggcaaactcataaatgaaagaagcagaaagctaggaacaaaaacaagcaagccatcaaaaacttttacttcaccccaaaccatcacgcctgactggttcattctcccactataatgagcaccgagtttggcccttaacaagctttgggagaatggctgcctttcaggacactgggctacagactgagcctcagcatattttcagggtcttgtaatagttactggacacatttagttggagaaagattcaattgtgatcactaataagagagaaaactttttaatatcttgaagttttgttgaaagtaccatttataactatacggaaaaagattattatcttagcaatacaatttaacacataaaaccaaatggctttcagagtaagtgagggatgtatgctagatgattacatgtaattccagatccacactagtgaagcttgactttcccatggagagaaacataatacattctgggaatggttggctccaaagccagcatgacatcttggttttaggttcgtttgcttcctaagcattacctctctcatttggatctcctcccttcaactaacagcagagcataacacacagtgcatttgtccttcatgtagagttaaggatcgtggggcctcaggcgtgctagtctagtactccactactgagatatgttactgtgtgtttgtccttgaacgagttatccactgttatcccataacttaacctcaaaatgtaaagacaacattaggtttgttatttcacaatttctcttggtctggaatcagggtgaagcataactgggttccctgaattatggccactcaaaatcatgatgtggtcaagaggagttgtagtaattgccaagcttagcgaggaaggggctgcttcacagatgacttggaacacagttggcaacaggttatccacagtttccaagaggagattacatcagaatagcaaaagatggggatgactgaagccacctgaaggtaccgtgatacagatttctgcatactatatactgtatctaacttcctttcagcagtattcatattctggaggattttattattagcataagagttacttgtaaaacactgggaaaccagcatgggactgatccaaaccccatgaatgtgggtgtcagtgaggaagcctcagaaatctatggggcctctggtagtagatcagtacttcttcctagcataagaatagactttgggatcccatttcacatagagggatactccctgagcctagacacacgggggagggcctaggccctatcccaaaggatgtgacactctgaagaccccctatggaaagcctcacccttcctggggagcagaaagggtatgggataggtagggtgttagtggggagaggcaggggaggaggggaggaacagagaactgagactgacgtgtaaaacaatcttgtttctaatttaaatttaaaaaatggagaaaaaaaagaatgtaaaatcacctctattagtatcatagtgaatgtttaaatgacagcaaaggagtcagtaagaccactcaaggaaacatggaagttgtaccaactgcagcttgaaggcagaaaacaaggaaggcagtggggatgtgtgaaggctcagagagccttatatatgacaatagtatcaactcgtctcacaactcattcagatggaatttcaaaataatatcactctcaaatcaagaggtgggggcagggaagtttcacagactgggaacatagctccctggtggagaatttatccagaatgcatgataccctgggatctatccccagaatcagtctctcaagtttggatcttatgctgtgtgaatatgtttgtttctgaaaacaagacctgcattccatgtgtgtgtacatgggaagattaagcaaataattttgaatggatactgtagtcaaaatgagatatcctatcaggtttcaaaagcatttcaagcctgattttgaaaaggaaaagttattgctgaaatattttcctactcagtaccagtaatatattcatttgtttagggtgtgtatttgtgattgtgtgaagcctgtggagagcttggggtcaatgaaatatcttagcatctttatggaaatggctcaagctatacagcctgcaaagtgacaataatgttgcttacagaccccctcattgcagtaatcatttaactttttaaagataatcctgacatgagaaggccatgcagttttccctcagatgttgttaaatgtgtattcattaaaagtacacacacacacacacacacacatattgtatgagtgtgtgcctgtgtgcatatgtatgagtgtgtgcatgtatgtgtgtgtgtgtgtgtgtgtgtgtgtgtgtgtgtgtgtggtgtgtgcccttgcacacctacagaggccagaagaggatgtcaggtgtctgcctcagtcattctccatttaataatttgagatagggtctttcactgaacctttaactcactaatttgctaggctgcaggaagacacatcaatactacagctgcatggacatatggcttttacatggctgctatgtgtctgaactcaggtccccatgcttaagcagcaagagctctttccgtctctgcactaagtgtaatgtttatcaaaggagtctcattacagcagaagcttttctcacgtgaagccacttctgacatgcagccttccttgtccccacatgctctatgattgctgtttccaaacatggctatttgagcacctccaggttagcaatctgtgacaagatgaattacaaaagacatatttctacttctgtgtcatcagagagaagatgaagaaaaataggaagtctgttttttttcttccaaactttgtggatttgatgaagtagctgctgacatagttgagaaaaatccccttccacaagggtttcaaagcatcatttctgcatctgaaaagcagaaagtcattctgagtcaatagttaaatctcaatgcagcatgcactgagttaattggggacacacacacacacacacacacacacacacacacacacacacgtacatctggaggaggaggaggagaaagagagagagagagagagagagagagaacactaacaactaaccttttcttctcttcattttcagtcttgggatcaaattgcaagtgatcaagcccggtgcctgtgttcatcatccactgggctaacagtgttgtaagagagagatgaagaacttgtgagtgcagtattggtttgtcgagctgccacaagtgccacctcatcccagggatttaagcaatagggatttattgtctctcagtcctggagtgtggatgtttgaagtctttcctagagcctggagggtacatctattccaggcctctttcttaagattgtattggattatatcttcccagtattttcacactgcctctctgtgcaaacttttgtctaaattgtccttctcataaggatatcaccacaccagaataagttccacccttatgaactactttaactcaactacctctgaacccaaatgcatgttcaccaaataaggttgcattctaaaaaacaagcggttaagatttccatacatgaacttgggaagaatactgttcaaactacagaagatttttgctattgttgtcattttaattgttttatttattgagttagggtcttatgtaaacccaattgctctcaaacttgattttgtagttaaggatgagtgtgagcttctgatcctcctgcctttgtatcctatgtatttataggcatatgccaccattgattttagcattgcagctggaaccttgggctctgtacatgctagacaagtgctccaccaactgagttccatgccaagcccccatattatttctgtcatctacaacaaaacaacgcggatgggataacttataaacaaggctgggaagagctgagtcaatgtgctgttagactcagttatctggtgtttcctccagagatggttgtcataccaccaggtcctgaaatgacaaaaagtacaagagataccctaagtcatctttggcaaggaaattagtctcatccatttaagaaagcattacaatacgtataataattactttcaagtttctaaaggactaggatagaaaaaagaacgtgatttttcagggatattctaacatacaaaacaaaaatgagcacatgaaatcagggaaatgaaaaatttgcattaaataaaggaaatgcattctttgaaactctgtatagcatcctataagacagactttggcttttgtagaagtgcaaataataatatcaaatcttatgattagtagtaactgcttgatggaccttgaacttttcttcagtctatctctctccttgactattatcctgcagtgcaagaggtctctagcaactatttccattgcttctgtaggaatgaaatgagatgatgggcagcactgtgctcagggatactagttattaatattgttactattgatttttgcagtttcccaattactgtaagatgttgagatcattcctgcaattaaaacagtggctagctggccatacacagaagaagcaggaggtaggttgagtggctggagtttatgtattcctacttcagcaaaactggagttgctattgcttgattgtatcactcctcagatacttaatttcataagctacagtggtattttcccttgtcatgtgtttgactaatgttgaaaaatacctgtgcaaacatcaacatcaattttaatgtaatcttcagtgtcaaatattatcacaaaaaagcagcagtgaattatatactgaggcagctactaagcattgaatgtctttaaatttttattacatttcatttactcagtgtgtgtgtgtgtgtgtgtgtgtgtgtgtgtgtgtgtgtgtacatgcgtgcacgcacgcataatatggcatacccatagagttcagaggacaatttgaattggtagtgtccttccataatgtggccctgaggagcatagccaagttatcaaccttgccagcagaagctttcacccactgagacatctcatccaactttaatgcatttctttaaatgcaaatcctctgtgagcttattggaagaaccatgaattagctcttccttatatgaagaaatatagacaatacattctgcattcactcattaatttctaaatcatccaaacaccccccccccagagaaccctgctaaataatcagagagcagtttcccataagaatgcaaaattaacaagcttggtagccttccatcactcacttgctggtttcctactaaatgcaccagtacttattttctaaagtatacaaactatgagaaatgagctcaggttactgaagaaatgggcagacgggctcctaaccacattttcaatacaagggttgagctgaggaagggtttctaagcttataactgaagggcagtagacatttacaggtggaaagaaagctgtagaagagataaaaacgaatatgtgatgttcagagaaagaaaggccatgtatcaaaggaagaccttaagaattcccttggatttagaagaaatgaagtctgttgtaatatctcatgagtcagtagaatgctaattgatgctccaagtcctatacatgaatacagaatggcctgtgtaacattataaatggttgccagtgtcagaggagtccacacactatttaagatctcttactcagacaaataaatgtaagacatcataacatacattatactgagatgaaaattcaagtttttctatgttgtgcttctaaaagccgaattctttatttccttttctttgcagcaaccacactgcccagctctgtggaaatgtggagccatggatcaccaacactcttctctcctttaaaaaaatgaaggatgtgctattcaacagggagtgggtttttccaatggaaacatgaataggaatggacttgctttattaaggagaaaaatgaactctctgtggttctctggagaacatcccagacagaagcgtgggaatcagatagagacactcaaattttgttgacagatccaagtccgaacccagtttactgctcctgccctgtgtttccaacttttttctttaccccggtgaacatagtccaaatgcatcagttcatttcacgccagtgtgcctttgttatcaaccctccctctatctcaaatgtccttgcccttgacatccagtgccctgtttcccaggtaactgcccacacatacttcaagactcatctctttaaaatttctcccatgcccttagttcacacttggccactcatttctccatgttcttatgttaacccttacctgctgtaaaactgctactcgtttctgcacatttgagaacacatttctttctctccttacagcctttgatatgatcagtttccgatgaatgaatgaacgaatataagaatgaatgaaagctagtccagagcattaaagcatagatgcaaaagttagacttgcctgtttcaaaccctttcttgactcctaccagacatgtgaaattttggaagtaatcttacgattcaatctcagtttttcaattataaaatggaaatcataataataatatatgaaaaatcaaaatgaaagtgcaatgcatacttaatacatgaactggcagccctggctttccaaaatcgtgtgttcgtgtgtgtgtgtgtgtgtgtgtgtgtgtgtgtgtgtgtgtgtgtatatatatgaaaatttcatttaatttttttttattaaacattatccatatgtaaaattcagttaacatgatttcattaaacatcatcagtctttagtcaaatttcaataactgcagtacacccactgtaactcacctatgtaaaaaaaatgtaaaaaaacatcaaaattgtttgcagaccaggtgtggtgaaggccagttgtggtggtgcacctcctacccccttttacagattttaaaaaaaaaaaactcaccttgaaaaaaattaatgcaaagaactttacatgaaaaaggttaaattgctcatgtggaggatagagaagggtcccagccttaggggtcagagtggagcaaagcctgactcccctcctgaagacatagtcacagggctgcctgcttcctgatcccagagttcccagcacattgggtattcctccagctgagtcttagctataactatgcaccatactattctctcccccgaaacctaacagcttagttgtcccttctccaaacactccaagcccccaattcctgttgcactcagcctcaagatgaggggttcaactgtttccagccttatttatattggtaatggggtcaggaaaagaccctaggggccatagagaccatcttgccccaccttgatgccccctccctatttctgacttctctctctgttccttttccagtgtctcctgccaccgtctatcttagcataggctgctagagctcctaaggaagctctgccaggagggacctccagggggttaatttgctgtcatctaattagcatttgctgtacctcagagttttctggaccagaggaagcagcaggagtgggtgagatgaaacagagctttgatgaaggccctgttcagctcctccctggtctggcagaacccctccaggcctcaggtctcactgtgcagggggcaggcaggggtggggtgggtgtgagatcagtgtgattttgcagttcctggtcttgggggatatgagtcaatgaaacactgtgtgtatggcagttgctgatgagggataggcatcgattctggtcctagtcccctagttcctctgggctttgatatgaggacatccctgctggcagcagtgtggcctcatatagccaaccttcagatacccagtccagtccctatccagctgctcagatattcatgggcctgtttgggagttcagttctgggccctgacttgggcactgtatggtgttaacgataaatctttctgccaaaagcggcccaagccctaccaacatgtgtgcgctttacgccagccacccgcctgagttagggccccaattaatgcagagagagacttgtattaggtacattgctgcttggctaatgactaggattcttcatctgttagctcagtcttaattatcataaatctatatattttataagacttatcttatcggacgccttattggtgtccttccttgccggtggatcacattgggcccctggaggaagaacagaggggtaaaggggccacttactgtttctccttgctaaatatgagtctccttgctatgtcacttctggcctggatcaccacgtctctactacatttcccagaatcctctttgactcctagtcctgtctaacttgctgtttcattggccaaacagaactttatttaacaatcaataagataaacatacacagaagtactttcctcatcagtttggagataggatggagcttgatctcttagaagaaagcacccatactggcccagtcctacaggtcatcgactagtgtggtggcattctctatttcaaagaagggctctggggacaggcacctgctaccactctcatctcagggatgttggaagaaggatgaggccaggaaggtctcactgaagtccgagctgtcaacagcctgttccactggagatctacagatagcagggcagctgatgtgttagccatggacagtaaggtccatgtctcagcaaggggcatagccctagggcctctggtgaactcagctactcagccagagtgccaacctggaagatggcctgccagtcaaagttggctttgaagtattctagctcaccctgattattcctaggtcaatgggaacttggctaccctcttaggcagtggctgctgacatttatactccagcctgcccacccctgtgctccaacccaacaactcatctgtggcctcctgacactcctgtaacaggtgctgggtctccatttcatagtcaaaggcccacctagggagcagtgctggagtcctgtgaggcttggcaggcaaaagcagggaggatgtgaactagcagcagcctctaaggcccagctaagctaagcagaggctctacatactgagggtcaatgcaacagaagctctcctctccaggttcatccttctctcaaggcactttgatgtagcacttgtacagggacaggttgtggcagatggaattctgccaggtaggatctgcatggctcaaagagcagaagtagttgttcatgattgacttgtacatggctaacagagtgatcatggtggttttgctagtttttctgcagttagatgagaatggtgaacgaataaggcagcttgggcacatgtatgcctttaatcccaggaagcagaggcaagtggatctctgtgtgaaggccagctggactacacagagacttccaggacagccagaactacataatgagaccctgtctcaaaaaagaaaaaaacatctgagtcatacctgattgctatcacacaactaacaatgtaaacaagatcttatcgtcatggaagatggtcattaacctctctaagtaccagtaagtgaatgttttattgtttgacttgaactatttccaggagattttagtgtgaggtttcttagccagggctacttcctccaggatatcttcaactccttttcatctatgtcaactttcctttcagtgactcctctgggactcatatttagtaaccctcaaatgacaacaatgctcatctttcagctatctcgccatctccccaatcagtatcatggctttgtacttctttacaactcttgcatctactgcacaattcccgctttccattttgttaaacatcacacatttttgtcacagaaagacacacaggcaacacacttgcacggtttgctttctatgagtccagtaacagatatgcactgaagcaattgtttgtacaatgatttctggactgaaagttcatcctcctaatctcaaattgttgtgttcccataacaccaaacaattaagggagaagcaggtcactccaataccatccagagaagcatcttaccctgtcctccctttccttctcatttccctcatccctctccttctgccatattctctctttgtcacctcctctccctgggttatatgtatttatcctccacacagtcccagttatggaatctcaatttgactgaggccactgggattatcttttctgacaaccatctgctctgaagtggtggtaaagggttcctagtgaaggtccccactcttctatgatttccagctcttgaaagtagaatatctacaagaaaaaaacctccctgttggtagcattaattctctcttatagtgtaactggatatgcaatattttcatgttttcctcttattatgagaacaaggaagaaaacagatgttaaactatcataacttttggataatgataatgaatcattctaggaaataccaaaaataaatgattgggattttatgaaaaatactttgttttcccagacactttctcacacccaagactttccagtaaattatgtctagagaccatgggacacagataatctgggcttgtgtcccatggtgggtttctggggtgattctttggaagcagattcctgggccccattttgaattaatcatatcacaaccaagtgtggggatgcacagatgcaaaatggcattgaaagttgcattttagtgagttatctggatgttgctaatgaggtctgaccatcttccagctctgagaaggaatatttacagtgcggccacttcatgtctctgtctatgctctttctttctgctccaggctcaaaccagtcttttcctagagtctgaactagaaaaaaaataaataaaaggtagactgttgcaaagcccctgaaaacttggcactatgtttttaagataagataacataaatattctgaatataaggagataaaataacctgaatacttttctttcttatagctaaaacaatggtaggtatggccaaataaacgcaaaaggtgacttttgtaatatcaaaggtagtagagtgaacacaccagcctataccaaaggagagcaataactcatgtttaggccaatctccctgccacagccccactccacattactcgaggataactgctctgtcttcagatcaattcaaggaagattatttgccctgttctctaagcatttcaaagcacaccttcaaatctatcttatcttttccaaggctctttctagtgacttttcacaaatcacaaatcttctgatcttccatgacaacagaacaaaacaatgtgctgtcaatattcaagagctgtttcactaggcaacatagtgctgttcagtaataagaaagaagtcctattcaaaatttaaaaatcagattctctttaaatgttcccttctgctatatttcccataaatattgcccccaaaacatgttactagaaaacttaattcactgtgaaaagtgttgtgtgtagtggtacccactggtggtgacaaggccacaagtactttgccctcttaagtggatttaatgttgattatgataatgtttgagaaagtgagtttaatttctgaatcttttcatctccctgttctcttttaccatggataatcatataagaaggcctccatcagatgtcagttccttgatcttggtcttcctaacctccacaatggtgagccaataaactatgttcaatataaatgacagaacacaatgttctgttaaagtcattgttgcatagcaatttcttctgaattgaaatttttcttccaggaaagtaggggagagaaggggaaagcagctcatgagactgaggaactgaacaaacttcgcatttctgggaaagctaaaatctaaaagattcacagggcccttctccaaagttatagaaacagtaaacaattactgagcagctgagctgcctagaggagactcttgggcatgttcatctgtttaaagtcatgcagagagctcagagttgcaatttctgagtcattacctatgtcaggatgggctttttgatgatataactgcttttgagtcctccctcctcctgtaagtagcctcttacccagcctcttgctagtattcccagtaagctctttagttcacattgctataattgttatgttggtatgtggtgatttccatatctggcatgagtgcatgcatgcattgtgtctcccaggcaaaggctcatataatggtaacatattaagattaagtattaattaacatattaagcagcaggttaagacacatccaggtgtgaattgcagacaatctacccaatgcctttgccagatccctgatttcatcttcctgatggcagtggttaaaaatacaagtcagaatataactaaaatccatggctaaaccatctccatctactcttgatgtaccataaatcagcaaaataggcaagactctgaaatagtaacataagtagtatcgtgaatgctacttggagctaagatatttacatgaactagaatagtgaatgctacttgggctgtgagacttatacatggaaagaaatgaccagatactacctgacttagctgcagtcatctgaacaagtaagcacatatgcaaattaaaaatacatcaataagatgctgtacccaaatgcaactatgtttcaaaggtatgtataattccactctgtatctgtgtaacatgtaagtcatatagtcaatgaagtatgccatttacgctttttgattagtccatcatccccatgttgtatgaaaacaaacacatctgtttgataataataataataataataataataataataatacagcaagcataccatttttaagtatcatgtgccaatgagatagctccaattatgtttagagagctacctttaaaggtatgaggctacctttgaagtccaagcgttactgaatgcagtttccaattgtggttgaaggagctaacataaatcagttcaatcattgccattttaaatgtagagaaaggagtcttccataaggactagggctatttacaaggcagaattagccaccaaagaaaaccacatatccctttgcattatggctcaagtcaaccaaggcagagagatcacaacagcccctcacagtactgtacctaaaaaaaaaaatgctgccccaccatttatatgggaccactccaggatctctccatccccctaaatgttttgaaataaggattagttaaccccctgcccacagaactaccttgttgggaatagttttccagcacagacaataactaagacactgttaagggaggattctttgctctctcctccctaaactgtaagagtgaagacattctgaaaattgtaggtgcggctcatttggtttcaaatttcccagaacaccaaaagataccacactactttgtaaccccagggtctatccagatctcactactgttccctctttcgtgcccccacaacacatactgactatgggttggattgtgcagccattacttagacttatatctgtataaatactagagattcatattgtcgacattatcagccttaattcatcaattgacagtcatgaccagaagcaacaagtttagcatcactccatgagggcacagatgtcctccatttcccagggattttcttacttgtagtataccgtcttctatcaatttcttcccccatcacattttcaaaatatatgaccataataagaatgccatctaggctggttaaggcatttgttcattaaaaagccaactcgcagctaaatgaagagccaaagatcattagaggtgacagagcatggaatgtctgaaatgagtgcctcccacaaggcctcaaatatcaccttggccatttatggctctatggctctcttggtgtctattttatacaccatttatttaaaacagctttgagagaaggtcattcaggtatttggatgtgggttaacatctaaaatgaaccatggtttattattcttcttattgtccatttactaaggatagtatagtgaatggttgaagtctatggcctcatttgataaagtgcaaaaacagcattttttgccagtcatattagaatggatatcttgatatttaaagccctagccctgtaggaaagagtgctgatttttctgcatataaatacatctgcgccacatctttctaactctagagcataatattctaactcaggcagaggagagccacagcaaaaggacattagtgtctgcagcaatgttctctttaaatgaattggatctttaagacaatcttatcaggcttgctttaatgtaagtggcagctttatgtggaagcacaagagcaggtagtgaagggtatcatgctgcatcataaacctgcaggaattttacaagccaaggtagatgtcaagataatgagaacagattcacttgtcaggtgctccgatgccaaaaccggagttttccaggattttcaaaaggaatcctccacagtgttttctttttcatacattgacagcacgacagcgcccaacagcatttgatgatgcccagaaaggtggataaattaatattaaaatgacacacctgcctctgctgatcatgaatgcctctgggtaatctgagagtcactttaaatgcagattttttttcacattactatttgcaaacaatctcacgttcattcccttcatactgaaactaatcagaggggcatactcagactaaaaagtaattgatgcaagattctgagtaatgtttttgtctctgttcaaattgctttgttttgttttgtttaattttgtgcaggcagggactcaagtcatctagaatggctgcaactctttatgtaggcaaagatgactgtagactcctgactataacctcctgcttcttcctctcaagtgctgggatcccaggaacatgcttagttacacccttgctctgagaaatatctctctaaatttctgaacaagtgagaactcaggaaatgtagtaaccaaaggtcaaaatataaggccgagtcatttaattacctctacaatgaactaagaagaattaaatggtcacagctcagaatataaagaaattgatagtgggacacacccagagcacaatttaaaactgttaatgtttaatgaatttattaacctagaaagagaatggcttgcaattgcaaatgtgtacacatgttgcagaagtctaagagaattcagcaatgaaaggatcataagggtttggcagtggttatctgaattcttctcaagatgccttctaggtgatggaaaaatgctttcgcactggaaccatggctaaagtttctatccagagaaagtacttaggattctgaaggtgtgtggaaggtggaaaccaggaaatgctcaaatcgagactataactagagaaagaaaagattcagtgatttcttaatcactgatagcatggtcattggaaatggtgaaaataatctatccagcacatgtttagaattaaagaaactaatctgggaagttctaactgacttacaaagtcaaaactgaagatgaaatacatttttttaaatcacattatatgaacagtggtagaggaggcatatagtgaataccatttatattttagtttgataagcaaactgggcatggttttgtttaggaatataaagggttttaaccattttatcctattatttcccccaagacccagtacccccagctgctccaaatggtgcaggaaaatgaaattagctgattccctggaaagtctgtagcattcagctttggggcgttgttaattctccttctcctggggttccaagggaggcatgcctgagggcagagcaaggaggaagggagaaaagaggaattaacaagctttctaacttattgctacccttacatcttccaagggaattgcttaatttcactttgtacctccattcagatcagctcaagtttgaagaaaagagccaattaaatagatggagaagggagacaaaggcaattgggtgggtagggaaggatagctagaatttaaacaagtaaccacaatctgagacattcccccacaatacttaagcataagtatttcttttttctttttctttctttctttctttttttttttttttttttgaaaatctagccaggacaggactttttatgttttgttaactcttactttttcttaaaatatggatggaacccctgacttctatttttttaatgtagccgattcacagggctggcagttgcctgatccatacaatactcattcatgttcttcacaactccacctgttcctaacaagtgttctaaagttgaaattgagaaatatgtacctggaggaagcaatgctttgggtgacaaaataagggaaggcatgaatgggaaagataaaagagtgataggtagaagtggacagcagggatgacactatgaaaatagtaagtacacaattaagtgcacaaaagttacccaaggacaatggccagcatgctgttaaagatgacaggaatgagcactgacatacacatttgttcaagtcactagattgtacgaaaatcctcattatgaccccagctcaggaaacctcactgaaacaaatgtttaagtgctctatggagtatcgggatcttaaaattacctgagaatgtctcttcttgcttttatatgatacaacttagaacattgctgctcataatcacttttcacaaatttgactccattcaaccataaaaacatgagtatgcacagagtattgttgatagctatcacaatagcttaagcttaagcttaataaagcttaagaagtacaactttggttcaggactgtaaacaaaatctaaatctatggctgtccaagaggattccccatgtagccttaggaaaattacttgactaagatagaaactaaaattaaatggcaactttctttgagaaaaagggggtagtaagaactactgtgcaaaattgtcaggttcaaaggtgcagctgtttcataaagtgactgacacaatacacatccacattatttctgtgctcaaccgtcgtcaaacttagagatatgtctttattactattattagtagtaatagtggtatttgatgttctaatactgtatccttaataaattctcctattttttcctaaactctgtctttctggaagataacatgaaaacacatttcatcgactttccatagactccttactatgttgtttgtaaacatagacctgaataaagttcccagatagacaatcttccatataagtacataaaaggagtattaaacctagacataactgtgagttattaagcaagaaagactagcaagcaacagatttaccttcctgtctgaaggagctggaaataggttgtataaaccaagattctgaagacatgggcaacaaagggcagtgaactctgcaggctaagggatgagataatgctggtaaagctgcctctcgctccccaaggagcttccgggctattgtggagtgaggagaccttgactgctaaagaggggtcagaccatcagaggatcttctctggctacagtggaattaacttagaaatcaacaacagttgaggcccctgaaaaagtccccaaatatttggaaaggaaataatcctttcttaaataaatggtaagtcagtgaagactctgagaaagaaaccaagtgttttgagctgctttggcataggtcctgagtgtcctccaaagttcatgtgctgaagattaggttcccaattcagcagtaggacatttctggtggggaaatgaggaggactgtgacctcaaaagtggattaataattctatagactcagatcataacagtttgggagaaattatttttataaaagggctctctctctctctctctctctctctctctctctctctctctctctctccctccaagttaaaggaattttgaggaaaaggaaaagtctctgaaaagagggctagaggcattggtgcaaatactgctgcctaaaccaacactgtgttgtcaactagtgaggcggttttccataagggaaggtggtataaaggtacctaatgtccagaatgacaacatctagaattcaagaggcaaggaagttcccttttcttcctagtcactatgaggtgagcagtgtggctccaccatacccttccaccatgctatgctgcttcaccacagctcggaggacaaggccaagaggctatggattgaaatctctgaaactatgaaatgaaggtaatctttccttcctcatttcttatgagcctagcatctttcctttttaaagacatgtttctcagtttcttagatgtggctgataatcagctttcggacatcccaggaatgaagcaaatacttccatgcagtgtccctcatcctcctgtgagcccctcccttgaatctgaggtctaaggaaagcacctcctcttcactcaactgtgggtttagaacacagatagagttgccatccattttatcaggacttccgtgaaaacagtagctgaaataaccatctgtcagtctgtcaatcatgtctttacttcaggttggagcagcagtgctgtgaaagcaaatacataccagccatatctttaaccagaaaatgtgtcctcaagagattaaagtgtccagtgtcaaaagaaacccatgcctttttgctctcttatcagtacgagcaagccagatgatctctaatacaaaaaccatatgccacatacttatcaatgaatctaaaagtctaatagccaaagtcatagttatacagaagactgtaattagcctgtgacctaagtgtgatttttgttaaataaataacaaaatcaattaatttataaaatcatttgatttaatgtcttttgcctaattggtttatatgtgaaattcagatgagaataaaaaggccaaaaacagataagagaaaaatagagtgaaatagtctttaaaataggagtcatttaaatatctaatatatgttttaagaaatattgggtacatctaaaatttttaaagatgcaaaggagaaggtcattcattagcatgatttatgcaaaaggatctacatattgttgcaccaatttttattagaaaatgattagctacacacaccaaaaataaaatgctgtattttattaattaaatggctgtatctgcagtccctcaaagcatggacttctcataatcacaaatgtacaacaggcactactgcccccctgagtaacttgtggtactactgatataattctcatttgtgtgttgctaagagatgaacgaactctacttgagagagagaaataagaagacctcctttgtcttttcaaatcttgccagataacatcttccatttttcttggcaacataaaactctattagagcttgtagtagaattgcatagtccaaaacagaacattgagtctaaagctgttttcacaaataataaaaagagagagagaaaaaataaagtcacagtattttgaatccacaaagaacattgtttaaattaatgacatggtttaatttgaagaaatatttatttaagatctgccaggaataactagcagtacacacatttacattcaacagaaatcatagatgtccacttcaaaggctttaaaacctaagaagttttttcaaacctcttttgggaaggtaacagtgtttatgaagagtgtgaagaaaatttctccaggcttaaagtgtccacaacactgatcttaaatctactctctctccaaatctctcactttgtctactcccaaagtacatatcacactcttgcaatagtgaaaagatacaatctcaaggtcagcaaggagctattaaatacagccaaatagaataatgattaaaatagtgatgacataactttttttgttaaaaggttacattaaaatatttgttatttttctttgagaatttcatgcaatgtattttggaaggcagctatgctcatcactatattaccaatgctccacattatattttgaacatattcatatccctgtcaattcttcatttcctacctaccattaaaatgatcttggtcctcccatcccttctcattcaacttttaatttcttattctttctccctctctccctccccacctccattctttctcttcctccacctcctcatttttcttcccctgttgagtctggtctgtgttgcccagttagttgcaggagtgggccctagcctggtatgcagtcaaccttccagaggtcacgtcaataaagaaaactgagtctccctcttcaaatgccagtagctcttcagatggtggtagaaaggtttcctgtccacctttccctgctttgtgctgggcttttgtctgggtggagtttgttcaggtcttgtatctgttgtggtgagttcataagttcatatgccctggtgttcctagaaccactgttccatttatgtaattgagcatgcctggctcttacattcttctgccctcttcatgaagatccttgagacttggtagagagaggggtgacattagtattccatttagggccgggcactatactgtttattctcttactgttgtctaacatgtattgttccacctcacgcaccgtttgcatactcttgatgcccaaaggaagcatttattagactcttaaccctcattctttgcttagtatttatatgcaaatcagaccaacctcagacttcctgtgacatgcacatggttaaaattagtgttcttgggaaaactcagcatgacagtctcctacaccctcagttcacccactctatccatcgcctctttgaacctctctgttctgttacagaatcctttatcagcaggttctgcttattttttttttatagatgaaagtcatcaaaccttgattttactttcaactccattgttccaaactctgtgacttttaatggaccttgagaacacaatcaggatttaaggaaagaatacactaagcaaattggagttcagtgacatagaatgaaaatattaagacatttgggaagtatatgtacttttcattaccatctgtttagacctcccttttatgaatataattttctccttcttcttgtccacccctccttgccagcaaatggtcctgtctctagttctctaagactgactgaaggtcagtatgaaattgaaatttgagaactggaagcagcttagttacatattcctttgcattgaatttcaaatttattcatttgcttgttcaactaaatggttttgtgtgttgccatgtaatgctaggtattgaatccagggctttgtggatgctaaacagattctctaccacaggactactctcccactctcctccaaaaatattttttgaagtcattatagacttacttggtacttaacttcttctagtttatcccagcttgttctgcacctatattacttgagcatttgtctgtttccctctctgtggccacacctttcatgaagaaaacttgtgttattgtacgcaatactgaagcatatgcacaggactcagtttaatagtttaggaatgtagaacgttccagcttcttgttctacaattcaaggaaaacaacactctggaatgtaagggacttttccaatctcatatatttgatcattggaaaataccaaatgaatcattaacctttagttctttctgtaggatgagtctagttgaatttgaatctttaacagatattggaagatgattgatcgacatgttaaggtgtggttttgttttgtttttggcattcagcaacccatgctgattcaggagggtttttataataaagggcagtgaggtggggcagggtaggaggcaggaacatcctccttgtgttctctcaatcccagtacaagactcagcttaggggagaggcagaactctgcaatggcacaggaaagctgaagcattaggaggtttgaggtactgaatgaggaggttctcaggatcctcaagcattgtcctcagatctctgaatacagaaaatgaataaatcatttgtttgcatcttctgactcaaaaacaaacacaaaaaagaatcaagaggtaatcaactaccatcgtgtttaattgtatttcactccaaaccagttacaaactcaggcagcttttttttctttctgtcactaaaggcacctgacatccaggacaggcttcttgtgcctgttcaggcttaagaacagtactgtcctattgtttctaaaggcctatccaagaactacagacactgaatttaatcctgtttgaaactgtgcccccatgcctggactggaaacctgagcatcgtggatgatctcactcttcctctttctaattcagcctcttctgctcattttcgaggctctagctccagcctcagagagaagggtcatagtgggaatggctcagcttttggagctaggtgatatttcctcccacctgtttttgcagactcctttgagtgtttgtctaagtattcaccaagtgtgggtcaattgaggcaagatcacttctctagtgatgcccatgactaatctgagttactgctgaattctccttgcctctttgagcagaccttctggttgctgccctttaggagctggacttctgccagtttcctttactgggatttatttccctagaatggtgaggtgtgtgattgctgatcccaggagcagggacatctcattcatcagagacacgacctccactactaagaagagagacaactccagtggaaaaactctggcgcacacctttaatcccagcactcgggaggcagaggcaggttgatcgctgtgagttcgaggccagcctggtctccagagcaagtgccaggataggttccaaagctacacagaaaacaaaacaaaacaaaacaaaacctcaaattacatcttcagacatcaagatcatgactaacacatgttcaagatttattccttaatacatttgttttaattgctatctaaagtcattaaaactacatgctttgatgggtactacctgttgtttcaagatatgtatatatcatgtgatatttaaattgtgttaaatatctttatcacctcaaatatctacaattcccttatggtaacattctttctagctgtttgaaatacatggtatattcttgatactcccctgtaaatatcacaccaaaatatttaatctttataattatgattactcaaaaatcaacttttctttatactgtcttctcccagctccacagtcttcaagctctgaaaaccacaaatatactctcaatccctacaagactgactgttgtagattctacatatgcatgagagcaagtagtcactgtttttctctgcctgacttgcttcactagtgtaatgatcaccacttctgttcatcgtatgactttatgcaattttggggactatttcccagttcttagaagaatgtcatcagcattttgacaaggattgcccttaatctgtatatcaatttgaataatatggatatttaaaacatacatgtctggggccagtgagatgatttgatgggtaaagattcttgccactaatcttgacttgggtttgattcaagaaatccacatggtagaaggagagaatagactctcataagttcttctctgacatccctatgcaagccatggtatatgcatgtctgcacacaacactaatacaaacaataaataaatctaattataaattttacaaaacatattcaaacttccaatccatgaacatgggatgtcttttttccttccattatcttagtgtcctcttcgatatcccacatccatggttatcattgtagagatcttttctgtctttggctaaacttattcctagataatatttccatatctgttgtacatatggttgctttcttggtttcaatttcagataatttggtatttgcatatagaaatgctgagttttgcatgttggttttatatctttgaatatgccaaacttatttgttctaattgctttttgctagtcttcagaattatgtttgccatagtttgaatgctgcccattgtccccaaatattcatataataaaggttttctcaccagggtggtactattgaagcagtaaaatctttaggaagtagagcctaatgggagttatataggtgacctgggacaagcccttgcagggcacagttgaggttgagtctttatctttctgggttttgtcccccccccccatcctgcacccctgtgatgtactagtgcagacccaaagcaactggattgaaacaatcatgaactaaaactccaaaactgagccaacacaagccttacctcttcccagtgtgtgttataacaataggatgctgactatcacagtgttcacttgatcctttcttgatccctctcacttaaagaaggctggtaattacaggctcctccccaacccataggcgtgcctccctgaagccatggagcatataataactggtatgagcaaaccccatttaagaccaccaactttgcaagcctaaaccctaatttataatgtttcattattcaaatgtggatctctggagacagatcaacagaagttccattgaacatattataggttcaatgttcttcacacttggatcagcttagaaaatgcaatggttaacctctaaacttcaggtttaaggacaggctagatcccacttgatgcataatccctcagtgccagcaacctgtttcggcaaacaggatcctgagagtgaattgggatggcaactagcagcctttaattgaaaaaatactactacatctatactactatactctgtggttggaaataggattaaatggaagataagaagcatgagagctggggtagagcctaaatcagggattgagggatccagcactgaccttgacaacaggcatcagccatatgttaatagaagggccacagattcttggtagagataagaatatctccctttttagcaagcaagaactttcctcaagcccccaggaaatggaggcccttatccaaacatttgaccttggaaaagtatttcttcttgggagcagacactatactacaatttcttagtcttattatacggtcctgttaccctcataatgctcactaaagggaaagtcctgatgtcttactcttttcccattatacgacactattctagtttctctacatttattgactgaactcttgcctttaattgtctcaggttctggatctgaggttctggatctgattataggcattttattctcaaggtcaggtgtgtccagtaaatctctaacatttctggtcttggtgtaattgggaaggcacgatggaattcctggttctctgagggggtgaagggggggggttccaaagaagtattttgtttagagaggctaccattttacacatttatatcctttaccaaagcccacacaaaatttcccaaatggaaaggcattaatattgggagtcattaaaaatgaaagtaaaaaggtcctagagaaatgtgctctacataatgttgaattgctggaactttgccaagcagcaatagtcaccatgtggtccatgccacctaaagaccttttagtttttaaaagttaatagctcacaggttccctatgtatttgatgaccacaaacaaaaaaaggagaatatgatgcaattcagtaaatatctccacgttacttagatattctttatctcatcgcttcccttttgtttgaactggtccatcatgacaacacaaagcttgctatttcacagataacaaaacccaactgggataaaagaaatattttgaattcaaataaaccaactatgcaggtaccacaaagcttagaaaacataacaataatagcactggaaaggttaagaaatatggaaatagcattgctttctttaagataattactagtgatgataataaatgttattaacaaaatttcatagtcttcttcctttcctttagactctttcattcaactgtacttgtatgtcttctttcttgggccagatattataaaatataattagggtcatgtgttctcctggaaatttgttgtagtttgaaagtttcctcagttactctacatttattgactgaactcttgcttttaattgtctcaggttctgcaggttctggatctgaattataggcattctatttccatatatatatatatatatatatatatatatatatatatatactggattctagattagtccttcctaaatctgatctgagtaaaattgggctcagagctcattgcttctcttagtgagcctgaatatacacatacagccacccatagcataagtgagcaatttagatatcctcatatgaggaagatggatgatctagttaacattttacaaggcacattgaacaaaatcaacagatattctggcctctcaactaaccctgcactggagggttttcttttcctggctttttggtgtgtctctgctctcttggtgtgctccctttgacagcagctcctacattattgagaatatggtttaaacatgtctgagtattagaccatccctattaaggcttgcattgctcatcttttttttttgttgtttgtttgtttttgttgttttttttgagacagggtttctccgcggctttttgaggctgtgctggaactaactctttgtagatcagactggtctcaaactcatagagatctgcctgcctctgcctcctgagtgctgggattaaaggcatgtgccaccactgcctggctctgccctgttcatcttaagctctatcactttagtcttctatatgagatgttctcctttcctcaatatataatcctgtgaagtaacagaaataacttttctctctgattatttctctgtcctatttattagtattgaatgtatattccttattagccataacagttgcactcattcaggtgacccaaatacagggcacagcactggtagggaatggaatggatagtgtcatcacttgcctgtggaagtttgtgagtcaacaggccctgaggacttggccagaagacaggctttgctttccagggcccacatgtttcccagctctgagaagcacattccacaacactctatatttctaatcagacggctacaaacttgttgaggtagaagtgatcacagtgatccagataattatatcttgaatttataggacacttttctgaggagctcagaatttgtccatggctctaagactccccactacctcccttccctgagtcccatcttctaaacagaagtgattataactataagtaagacattctgtgagtttatgagggctttgttagatggagttcttggaacactctccctgtaactctgggaatgatgaataagaagctggcagtgagctctggctcctgcgatggttgtaatgtagtttgctctctgcctgagtaaagtgttaagacatgcgtcaggtattgttagagatggtgttcagcaactgtcagcccccaaataattacagaccacaggcatctcagatgtgctccacaggggctgaaaccgccttccaccactgttttgttggcactgtagagcaagaatgtaaaggatggtcctaggctcacctgaggctactaattatactgtggctcttctctaccatgtacacatcaaatgttctgtattgtagactggaaattttagaggaaaagaaagaagtcaatgcagattaaggtcaccatcgacttcctcaatggctcgtgtgtgtgtgtgtgtgtgtgtgtgtgtgggggggggggagagagagagagagagagagagagagagagacagagacagagacacagagacagagacacagagagacagagggatcaacatcttaacatcttgcaacacctttaagtcaatgtagaaaaggaaaagtggtataaacatgattccagtcaaaatgatctcttcaaattgttgctaaacaatggaaggatgtccttgatggtgtcacaatgactcccactggggttatttgcatcctgtaggtcacacatatctttggtaggctgatttcaaggcatgttttacaaaataaccacacagaaaagtatacacatcaagagacttcagacttcattgacattccttaaataatgccttcattcaggaagggctggtcttcatgtgcctgagagaccatcattttaggccagcaaagctccttcttacgcagagaaaatgaaagccctttgaagattgatgcatcatctgtgggtcttcattcattttgcaagggcacaaccacgctgtttcctgctctgaagcaatttaaggagagcgagtatcagcctcgcttgagagaaatgaatcatgattcagaactctctagacttcccatatttgcccagcctccagatcattatgcccaaactctgctcctccagagaccactgggagttaatactgagtcttgaagcaaatatgaaaatatatgaagaggtcagaccttttgcccaagccatcagtgtgttttggttagcatgtaagaacattttgaaatggcatttggagtcccttggaatacttctttagacaagtatagcacacacaacattatatttccctaaagtgcatttttaacatggctcaggctcatttacaggaaaacaaagctgtccttttgtagctttctggcccaggcccctaatgagactttgctttgctaatctccaactcctgtaagtggcttctttttttttttttttttttttttttttttttttttttttttttcccttgcatttgggcttacagctgtgtggctttggcactgagattctttctttaagctttgtttaaaggcaatccatttgatcaaagagttctaccctctgacttcatcttttatcattccccagtcagacctgggctatgggtagaatcctgccgttattttatttaacataaaaaatgatttcattttcctgccagaagcaggtcttactgatcatttcgcttgccacctagcagcctggagaatcatagcttttacataacttgcagtagtgggaaatggcagatcatcctaattaagaaaaaaaaaaaaaacacggacagggagaaagactacaacatagaacaggaagaatagcaactctggtgaagtcattattcccatagtcctagagactgagaaattgtcaaggccgcaggaagtgctttcaagggcagactctatgcagctcagtgcatttggtcttccacctctctttcttcacttcaagtgaggatttcaatttaatccagtgccacaataccagcagctcagaagaaaacattgtgaattcagaacagaaaaatcatctaactattgcagtcaccacatttgggttcaggaggtctgaatatatttccccctaggcattctttcttcttttttcccaacttcaaaccgtcagtcagtatcttctatttgaaaactcaagagttgatagaagagagggcaatgcctgtgtaccatggctgctttagatgatacctcacgtgttaacttgggttcccaactgttacccaattgttggaatgccttgattatagccccgagccatggaaataagcatcatacagggtactgtggcatgagtgctaactcagaatgtagacatctagaaaatacaagattagcagcaaactgtagccggttttatatatgtgctgcctataattgatatcatgtgttctatgaacaggctttgacaaaaggaaccactaagcaagtctctggaaccatagacacaactttggcatcagatgaacatacacgtgtaaacacattaagaaatagcactggcaggtgggtatttcatgatactcacaagctcagtggcttccaattgtagtgagcagatgaacagcccacatctaaaagcaactgtggacaaacttctggccaaagaatatcaagaatctcccatcctgaaatgttacagaaatattctttagcatgaaatactacctgtagtattgttatggcatttaaaggatttacctgaaaggaaggaaggaaggatactactgttctttcaaccaaacaaagggaagatatgactttctgttttggctagaaagaaactagaaaaataatttcaatgtagtaggtgttgcttatcaaccccccccccccccccgtgtgtgtgtgtgtgtgtgtgtgtgtgtgtgtgtgtgtcacatttattgtcactagagtaaagatattataaccttttagaattagatacgaagaaaatgatgaaacacattcatactcatggttttttattcctattctatttgccatttctttactaagtactttaaatgtttaaactcatataaaactgcccagaaaaggtgactattttgtcctaattttagaaatcaagaaattggaatgtgcaatgctggaattatttttccaagtcaacacagcaaaactagaaggacaagattaatacgcaatcccttctacaagctctaataaccaagtggctcagctatgataagctttactggctagaaatcttagcagttgtaacttgcaggtcatgtgaaatagggtgagccaatgaatcaccactagctattgcaatacccccaagctgacagtattcaccagggaaataaccacatttacagaatgaaatctagtatcaggtgtttggagtctcgtcctggtgtactggaggaagtgctatgttcattcatgcctatattatacaatacataagaggtttgaccatgcaactttcctgaacttataatcaagaaactttatagaaatgtgaacactgcttttcatatgaataaataaattcttagatcgttttcctttgtaattgagctcctgtttaattaaaagtatacctagctatcatttttgtcaaaattgtttccaatttagaaagagagatccctgaagttattgtcaaccaagatcacatggttttaggttttgatagtgattgacctagaaaaatcataaggtatcttaatataaatcacagacaaaagatatattgtataaaagaggaggcttgcatctccattaataaggatagaagaggctgtggagcataaaatatgaataaacatgcagcattgccacatattttgtgtcacataaccactggtatttcatttaaaaaaaaatgaaactaaaaggtggacaaaagatcctgtgaaaaagttttgaaaacattctcatattgtccccaaaagccctttccaagtaacttaattaaacatatttttttattgtacaatttaaagcctatggcacttctttactgggtatatgaggggtccggctcttggaggacatcccaaatatcagtgtgtacccttgtatttcccagtgtcctctacagtatcagaccattttgctataaccagatataaacctctttcttgccaagctcctatcttagtcattttccaagcccagactccccagcctgtgcatctggaagtgcaagtctctgaaatagtaaagtcaaccaataggagagcttctgctccatcagtgcctgctgagagcacaagtggaggctgtggttgttgtgtgaaaggatacatgtataaacactagctaatggtgccatctggggagcttgtgggatatttagtgaggagggcctagttggaggaagtggatcactgtgggctgggtcatgagctttagactccaccctcctcatcacctgggttttctctgacttttggtggatgacagatggaaagagcagtggctccacgcttctgtcatcattgatacaactccccactgccaaggttctctgtcctgaaagactatagcttgaactgtcagccaaaataaattgtctctccctgaagttgcatttgtatggaaagtatttggtcacagtgatgacaaaagtagctaatacagcctcttgactatgacactctgtaatttctgatggatgagaatgaacctgggttaaccaaaaagaattgttccaaaggctgtcagccttattttatgacttttgatttactaagtatttataaagttcctgtaaagatggataacataatgaacaaaggacacactcaataccctctttacatgaatttgacctggagcctatgaagtactctgtttacctgttagcacaagaagatagtcaaacaagtgtttcacaatatgcctatgttgttatatatccattattatactacatatgcactcatatgtatatatttatcatatatctcatgtaaacacactcttattggggtccgtacattagcctactgaatatatagagtatggattttataatgactacttcctaggtaccgtatatggaaaaagtccaatcagagaaacacaaatcaaaactcccttgagattccacctcacccaagtcttaatggtagtcattgagaaaataaataacaaaaaggatgacagggagtggataaaggtgagcccttacacagtgctaatgagaatgaaaacaggttaaaccactttggaaatcagcacgcagctttctcataaaactaaaaatagatctatgaggtgacaaagctgcaaaagtctttggtatttacccaaaagacttcaagtcaatatatcacactagtgcaataaaattatgtagccagccattgtatctaacaacagaggaaaggataaagaaaatgtagtgcacaacagagtgttttccacttgttaccaatgtaaacttacatcacgtgcaggaaatgcacgcaactagtaacaagcatactaagtgaattaagccagtctcagaaaagaaaatatcgtttgtgttttctcaaagcaaatattgcatgtgtggttcctagatgtttaatcaatacataaagtaagatctgtatatgtgatatgaaaatagaagagaacctatctagaggaccaaaaaagtctaatgggaataagaagagaagtgggggtatgagaaagatatgcttgtgtgtagtatatacctgcatgaaagtgtcctcatgtagcacaggatcaagtagcatgaaaatgcacaataaaattgtcaaaataaaagtcaagaaaaagaatgctgtgagacacgaaacttgagttaatcatttggtgttcacagcagattcctagcggtgtttcttctccttgggggaacagaacagaagattcagtcatgtagaatcatgggctgacaggcctacagagttagcttaatttagccttttatattgaaagcatagacctatagaattccagtttgacacccaacatgatggcctctgcacattattattaagcaagcatgagattttcccaagatagaaagctattatactgatttattgatcttccagaagcccctccatactcaactgaattagatagccaaagaaatcctcccaacaatggtgggtttcgaatcaaatcccaggacgtgagggtcacaacaatgattggcatgagaagttagatgaaatactacatgacaaacatagttgaaatcagctatatacctatagaaagaagagaattgaaccagttatagtggtgtgcccttgtcatcctaggtttcaggagagtgggatgtcagggtcaaggccagcctgggatacatagaaggcccaatcaaacaacaacaacaaagcaaaaaaaagacagagagaaagggaggaggagagaatgaagaagaggagaggcaaagaagattagaaggagggagagagaaagggagaggagataggaagcaagcaaacaaaaggaatagcattccaaggctggcatattaatgttcaacctggtacatatctagtaagattgatacaaaagaggattatgaattcagaggcaaggtctagcctagcactgagctgatccaggattccaggtctgggtaacatttaaatttcacatgccacgtttggtttacctttcagatacaaatatcttcctgaaaacccacccccagggccatacctcctcctgcaaagcctaacctcctccaacaaggacacacctcccaatcctttcctgacagctcttcaactggagactaagcatgcaagtatatgaacctgggggccagtctcactcagaccactgcacagattaaggccctttctctgtgagagaagacagaaagttggagctctcatgataattgcaagatactatcctaacagatcccaaagttgtcatctattaagaaacagcaagatctaaagaagagggtagcaccaggtatttcccaagctcaagtgtgaagctgtgtagccgactgacaatttctgccaagtatgatcaccttcattcagctggatttgcccttggcctcctgcaggggcaagacctcctcccccatcacatgttagtatttgtctattcagtcgatgaaatggattagtccatggttggaatctgcttcttggtaaaatattccagcaaaagagttgttttactgcactttcccctcccaaccaagtccagagaatgcaacccagcttcctagactccagcctgctgcccggagtcctttaccacccaatgcttggttgctatcaggcagactgttctgtggcgcacagctggggtccactttctatctgctaagaccatttaagcgtgttctgctccattgctcagcattaaaagagtctgtaggcaaatcatttttgtcacaaatgtacaacctagctcaggttgagacattcttgagcagcttgagctctggacacatacaggcacctgaacaagttaagtgactttatcacaaggttagttaccacattttcactgttgtctagactttttataaatagataattatagatagatagatagatagatagatagatagatagatagatagatacacaattttttcttgttgcattatctgtccacatgtggcttagatactaatgacggtgttgaacatataatcatatcaaacataacatcaccttacaatgaattccaaacagagagtcttgcttctttttctttttttttccgtatttcagttttagtttcttgaaattattctagctccaaagattgtgctcctatgcaaactaaggaacaggctgatgttaagtggcctgtgctgccatctgagcccatggtgatccatgatgcccccaagggtaatttctgaggctgttggcatgctgtagtcaggatctgtgctggtgtccgtagcctgtgttgccagcaaaggccatgtggatgtccatggtctaggctccaaagtcatgttgatgtgagtggcctgtgctgccttccatctgaggccaagttgatgtccatgattcaggctgcctcccagggccttgcctgcatctgtggccctactgcagcagagggctttgttcatggtctgtggtatcaccacaattcttgtggaagcccatggtctgtgctcctgctgactcctactgacttgctgcaaaaataacaaggaggctacttttgcagtgataccaacgattgaagatgcacagttgagaaagagggacatggaaggcttctatgacaacccctaaccccacctcaccccaccccactctaaaaaacaaacaacctaaagaaatccatcaaaaagaactcttaaaaaatgtgctaaggatgctgaatttggctctccacaattgatggcttctggccaggatgcgactcagtcctatttaaggggcagggccgctttgaatttgaccatgctccattgagtatataggtaacacaaattggacttattttttgttttgttttcttctttatttatttggttttaatttggagagggcaggaagtcacaagggtggggacatacatggaaggactgggaaatgagtgtgagtacctggtatgaaattcccaaagattcaataaaaatattctttaagaagcatactcacatgtagagatatcttcccatatatacagcacagaaacacttcaaactattccagcattcttagagtcagtgaatagcagctgtattgaagaaaatgctgggagaagcccaagccaggaccgagagttctaaagacacccatagtttcattattcaagaaaggggaacatttgatttcagtcaagtaataaaaacaggaaatcaagcattggttaaactagccaaagaacatagcctacatatcccttcctcattacatttaaaatatttagaaaccagagacctcaatttgaagcatgaagagatggtttaccattgaaatgttggttatctacatgttgctgtttgcatcacccctccagtggaccttagctatgaaaaagggataactttaatttgaaagaacttagaattttacctgcaacagaactagataaatccacccagagtctaagatcccagtggataacttttgatgctcgtgttctacatatggatgaggggaagatagttcagattgacgtgcgcaagttcctggtttgggtaattctctctggctttatttaattatcctgtgacatttatttaaaattagttagaaaggtcaatgggagctgagagctcagttagtaaaatgtttgctatacaagactgaggatttgagttcaatctccagcacccatcataaaagctgagcatggttatgtggatatggaaatccagcactggagagtgcaggaaggaggattcctggggctcactggccagttaaacatctggtttggcaagattaaggtcccatgggagacctggtctcacaaaacaagctggatggctcctgaagaatgaatggtacctgtggttgacctctggtctcctcatgtacaagaacaaagaacacacacacacacacacacacacacacacacacacaagtaaataaataaacagtggaaaaatcagtggactgttggaatttccttctatttttcacctagttccacagtacagtgttaaaacattatgggaggacaaacagttcccccacatgccagagctttgtgtcttagaaacaaacacaatgactttcaaatgctgaatgagaggcaggaatgtggtcccttgagcagcagaatctcatcaacttggggaagtaagtgaacatttgtaaggttcaacagcaaacaaaacaaaataaaaacaaacaacaaaaaaactgatactggttgttctgactaagatcacaattcctgtcatgaaggccaggcagccattgaccctgagaatgaaaacaggaatctctcctggtatttcagtgggcaacagagagggactaactgccaagactttcaacatgagcaactgctgggatgtaatgcagttgtcacaatgaaggatgataggaacctgagctaagacatggcaaaggatgccagaaaaggatgctcaggagatttgtaatgtattaacagagcttggtgacaaattggatgcttacacctgtcgagtaagagctttatcctgcaacctgtagtaggcagactgaaagtccctcaaagactgcattctaatcttagaaactaaacggaaaggtacaccagaaatggcgtaccataaagtaatagagaaatagagtaccttggcttatgcagatgagtttgatgggatcacaagggctcttcagatgtgaaaggtagattcagaagagccagggttttgagagccttgatagacactgctgctttgaaagtgaagagagctgggaacatgagagagttgggcagcactggaagccagagaggctatgaaaattctttttggaaagaaaggcagcccctgctgggaacatgttgatctgggtggcctgtgctgccacctgaggctagagagacatctggacccttggacacagcctagggctttgtctgggtccatggctttgcagtggcaggggtctggggtgatacccatgactcctgttaccaccgagggctctactgatgcccagggtctagtcagccacctgagagcctgctggtatctgagggccatgttccccctaggaccatactgacctgagtggcctgtgctcccacaggggccatggtgatgtccatacctgagctgctactgagggttacgtttgggtccgtggccctgctgcagatggggtgtgtgatgatgtctgtggtccatgttagcagggtgtcattggaaccatgctgtgctgagccagccccacccttcactggcactggaatagctggccctgcccctcactggatactgcagcatgagaactggacctcccccttaggtccacctttccccacccctgcactcaagagggatggctccactcacccttcactacaggaatgcacctcacctgggcagcacactagagctgaccctgttgtcaggggcacagatgagccagccctgagggcataagagcaggagagttaaccctagccccacttgtatgtcccttacagcaataggaagagagggccctgcatctcacctgagtaaaacagtggtgtgagtgtgggtaaatgggctatgaggacctgagagcaggggaatggccctgatccttgctacagcctgcactgggtgagctagccaaggcagtgttgcagagttcactttcttagtgacgatgagggaaagctggcaggctgagcaactcagctaccatacaggcccagaacaagggttatgagttgtcccacctcaacatcacctcatctatgaactgttagagcacacgaagtggatgaacctatagatccaaaactgcaggatctccacaagacaggatacccaacaggagccccagtaagagcccatgatcatcgtgtagcagaatccagatgcctgagccagaccaatgaccccaatggcaatgaacacttgcaaataaagatgaatggactcaacagaccgcactggagcctccatgatgagattcttctttttgttgtgtcgttattggtttttgtttttatgttttcattagtttgttttgcttgtttgttatgtttggtctttggcttttcttttaaattttgttttgttttgggtggggaggttgcaagggaagagggaggatgtgagggggtaagggaatgagtgggatcagaacggatgatgtcaaatccacaaagaatcaataaaaatttcaagaagaaaaatgaaaagagaagaaaggtagctctgcacgtatctttgtgttaccccacaagacacatgtccacaattgtaggatgttatctgaagccaggaactttgtggaattttgatccagaatttcatggcttaaaaggaatacatttaccatttgtgctttggtaacagaaccatggtctctcagattagtttacattgttatcacttttatctttcatatgctttatatccttctttgcatgctttatagctcagtgtttatagtttatttagaatccaacttttagatagtaagcacaagctggctagaccatacctactactgtgttactctagtactctaaactattaggtgtatttcctgtgaacagggtagcccatcaaattacttccatagaaactagaaggcaaagagcattttgtgatgcagtctccttctcctttgcttatctactcatcagtcaactaacgtagtttgcaagcaataaataatttagtaacaaaatttaggcagctttctgtcacaagatatatttattttgctgttgaattaattaatgtttgggaaatgccatgtaaatgttagctcttatcctttccttatttatagtaagtaaataactttcaatttaattccctacactaagaaatgctgtgaagtgtaagttctaaagttctaatgatggaagaaatattgcttgccctcgtggctttctctgtaacctacatataatattcagaacttgaaatgatggagataatatcttcagacctagcttggcccaacagtcatgaaacatagatgtgaaggattttggctcagagccttaaaaatgaatggagctttctacagtgtctatatagctttccaatgagggaagtgatagagatgagaaggtaagacattgttctcattgtaccctgagggcaattaaaagttgtatgtgtttacttaaggacccaaattgcatttgaaaatagattttaaaaagagactattttaattctgctttaaggtctcaaggagtctaacgcagtgttcatagaagggctcttccttgaatgatggataacaactggaagaatgttttatgttcagtaccaggtgtttttaaaggtcaacagaagacagtggcctgccaaaagataaggatcctatcgtcctttgcaggcatagaagtgctgggaatattattttcttacctaaagtggcaggcagccaaccaggtgagtcagcaaagaatccgatctctaggttagtcctaggtattatgctactatccaaaggacaaaagaccttcaagtggatcaataacaggtgcatgagtcttgtgtgtggaattgaagctgatttccaggcacaaaatcagcaggagacacccttccttagaatccagggctgtctagtctatgcgattaagctacagagaaacaaaagccaatataaaaatgacactgagtgctgtcatttggttaatgttgaggtaccatagtttcaaattacagacaaaataataaccattcaaaatattcaaaaactgtctggatttctgtgagttaggctatataccataaatctcaaagtgcagggtaattgcatcactgtggcaagtctgtttgcagtgtaaccctgtatttgagcttctctggagggcgaaggtgtaatctgccacagctgtgtaattgagaaggctctgatgcacagagccatacaagtaatttgcaactagcagggctcagggtattttctctcagaatgcaagggtagggttctgggttatagttgtatttctccctcacaaatgcttacaaaagcttcttgtggtgacagaagcagttctaaaataggcagtgcaagtatatttcacctcaactatgtaatttcaaaacaacttttaaatgccataagaaaaatcccacctgagcccaggtacacggtgtatctttcccaggaatgttgactgtaaatgagttttgagtaagtaaatatcctgaaatccttcaaatacatgtccctattaacttcctcctactaaatactgaaaccaagtaactcatggtatgttcaagggaagtttatgcctgtatatacatagatgtttccacttatcatccaagctcagttgtaacagcagattcacagcaacttccactgcctttgttctatgaaggactttctatttcattaatccgagagtagctgtgctgtttctaagcctttctgcatgaatttctaccatgcattgtcaagatggtttgatttctgccttctctcttagagttacatttacaaagagcaagctgtaggccatacatagacataacctaatcacaatatcattcaatagttatgtcccaaatccttctttcatctgtgagaacctggctgaaaaaagggccacggggtctccagtaactactaatgagctcctgcctccctatgggccctttcaaagccccacatcatctgtgtaagttggacaaggaagactctcgattcacacaaatgtaccttgggctgttcttggagtcactagctgagagtgaagctcatttcaaaaactgactcaaactcaggacttacctggaaagacagcttttcccagaacatggtttgcagaggacagtcaagtcaagaggacataaaaggagagaactggcaagccgacttcacctcagctgggatcagtcagcaaggaggagtgtcacagagggcagcatgctaccagttctcctttgtctcctactaaataaatttacccttattgttccacagcatatggtataattattagtagccctgtcatgaatatattagaattaactcttacagatccagtttgtgcatttttctgacagagatgaactctgaaggagggccataatcatttttgcctgactgaattagtagtccagcacactgacctctgggcatgacatgacaattgcctcttgaactctcagtaactgtgagtagcccccaggagacctgtataggactgaggcctggcccaccaatgtgtctgtcccagaaaggaacaggatctcacactgtcccacccctctttgaggatatgtagacaattactaggttgctaagagagagaacaacttgtcctcagtgatgcagccactggtaaattgaccatgttcctgtcaataacccctcatccctgtggctatgaatgagctcactgagcagttcactaagttagacgtgagtggagtcatttctttggtctgtgcttgctgctctgatctggggtgaatagatggctagttcatgctttcagaaacaaatgtgcatgcaacacatagtacttcacagacagtgaatgtcaaagaagaattgattaatttgtcttttcaaaaactgtcccacagatatctagtgtctactaaaagggaggtcaggcccctggaattggtacaggacatactcagataccaaattcttgaccacaaggagatttattaccccagagggacaaatgaggtggggagaggctgcaaaggttgcagcagcagcaagcacaagaagcaagaacagcaagagatgcaggagtggacttttatggataaaaaaaggggagtttgtgctaggggagtctgtgctaggggagtcttgctagagggagttggtaaatcctgatgggacatattagccaaataatgaattttgattgtaggaccttggtgttttgtatgaggaatgagtcactggccagataagggaatagaccttgggggctggctttaggaatgtaatgttttttagcaagggagaggaaaaggggtaaaagggcaaaacctgtctgcaatgcttgccatgctcaggcctgttagagccctttcatctataccttccctagaaggagtattttccaaatttcatgaaattgaatgaagaaacatgaaataaatacttaaggtaataatgatacacagatagagtgtcacaagactgattgaagcatgaattaatccttctttgtttaccaatgactcattaaatagatgagagtgagcgtaaagacacctgtttggacttaggggtatttaagaacgtgaaagtccccactagcctgagacaatttactgcagattgtgggcaatgtgaaataagggaaaacattatcaatctcactcaagagttcattgcagatattcaataaatgttaagtgactgactagtaaatggagattggggaactcactgaaaataaaggctgaattaacaatgaaaataaattctgactaacccagggaatgtacccctgctattaaattctgtgcaaacacagaggtgcccagatgttaattattttttgtttgttttgttttgttttgtttttgctttcacagattgcttctatttcagtgggcagatccagaagcagggcagaagtgcagagtgtgccatgtgggactcagaattcttggcatttttcttcagattcataaaacagaagaaccggaaagatggaagagcttggtttgcacccatcaattccccaacctctgcatggtttctcttctcttggaacacacaggcagcttatgatctcttctcctccctgaccagctgtactagggtgaggacatctgtgagacgatattgatgagaagacagacctggcatcttcaggctcactcagacaacactcttccctgactcaggggttcagagtgaaacatgcttggtcagaagcatgaaaatccccactcacaggcttcctaccatgggcagataaggtgttctctgagcatcttgcctggccactgggctgctgtctctgtccttgaggtctggtggcaatactccatcatgacaatggtacttcccatgctttcagtcagaaccagaaagatagggactacaaatatggctcatttagcaaatggctgacatttaaccacagggacttgagtttggattcctagcacccacatttacaaagctaggcatggcaaaatgcaagtgtcacactaatgcacggtggagggagacaggaggaactttggaagtcactggtcagccagtctaacagatgagtgtgcaccagttgagtgagagaccttgcttgagaaaatgatgtgaagagcaatagaagaagaagagagcagacgttgccatttggcctcaacatgtctgcacaaaatcaggggcatacacacaacacacaaatacatagaacacacacacacacacacacacacacacacacacacacgcacacacacacacacacacacaccctggaaagactaaaacaaaatgacaagcttcttgatgtgtctctttccttgtgtcttgttcagacaaggtggttacagccaaaggcaagggagaattgtggagcccagatcaagcatgccactgatgtgtaatgtgtggctattctcatcaatgttggtgcttggcttgtgcagattcccgtgtcagactatgatgtagagctcaagggatcatcataccctctacatgctctcacatgtatctacctacatgtgagagcctaccaaatgaccaaaacagctgccaatcagcaaacaaactcttacgaagaaaagccccatgaaggttttcatatcttattggagaaacctgtgagtgcagcaaccaatgtccttgaggtctctgtagtttttatgacagtgctaggccctgtaggtcagggctctggagaaactgctggccttggactctgagtgcagcattcaacgttcatgtggcttctgtgaaaattacttaacttctcagtgcctccacagctttatctataaagggagacgatgctaatgcgtctacctcacaaatatatcttgaaaaagtgtcatgcttgagagaacccacagaagcaaatgctccctaagcgttgcctgagtcaaccttggcatctgagtagactgtaagaagtaaaggtggggaaaaacagtgagtaggatctgtggtcttatgaaaaaaggaaacattttcatttagaaatgatttcaaaactgaaggacagaaaaatccttgggcacataaatgggaaagagacccaaggctgtttggtgtcaattatttgcaagaagaaaggtctctgcactaggcaatgaagttaaatgtgttttgaatgaacatttataaactcctgtgattgaatcagccaaccattaaattttaaattaagccaagccctatagaaaagataggcagctatctaagcaacaaaaatagagattagaaaccctgctaatttgattttcacatagtcccttttatgatttatataaatatctgcaaagtagatgacttaaccaaaatttcatattaaaatgggcttatattagttattccaagtaaatcaagcaagtttcccctataaaatatattttagatttcatatatgagaatataaatatttagctatttcaaaaaatagcatgtatagatatttcaaaagaaagagtaagaaaacaaggaagaaacaaacatacctcaagcaactaataatgttgttagccccaattggaatgtatttatataatgatggcatgaatgaaataaagaggtcaaattcctcatcaccgtgttaagattatgtaaagaatgattgaattttagagacattttaaataattgatcatcacctctaacttccaagttttaaaattgaggcctacagaagacagacaacttttccaaaatcataattaaaatgatttcctggtgtgtctcacagaaagatagcttttctcctgtgacgagaacaacatgaggttgcatgatggaattcgtttcctaaggctgccataacaaattaacataaactggatggcttcatacctaataaaggtataggcattgctgtcttccctctgtgagctccagaggggcatgtgtctcccatgcttccagtgtcttctggcttccggtaacagctggtattccttgatgttcacctcatatttctcaaccacactttcccatccatcaataactcctaatttcatcacttcaaacacctatgggacaataataactcagaataggtttcctcctagatccttcactgatcacatttgtcacataaggcattactcatccctttactctgtaaagcaatagtcacagaactggaggtcaggatgtggaaatatctgaaagtagaaggtagagaggtaggaagaacaacgctgagcccatcatagctttcagtagtagcaagcctatgggtgtttctgaaatagagatggctttagggtaaaaccttagagaaggattacctttttccacttgcccaataactcattctttaggtgtttgtattggcctgcctttggagttctgagagaatacaatctaggctgttgccactaagagcaccacctctgcctatttattatgttccctttaaaaagggccctgccctcctctcattgttctctctcttttttccctctctctgtttgtctgttcggttctctctctctcccatcctaccccccctctctccctttctctctcctttctcccactgtacctatcctaggaggctgctctccctgctcccctttcccttttctacgatccttttcccttaataaaaaaactcatccacttgaactcttgtctcatggtgtctttctctcatgcactgcttaaaaaaaaattaaacagtgaccacagacctcagatcaccatttttacctaggtctcagggccctactcaattttggcatttgacgtcaagttaaagaaggcaaaagggacacatccaattatgtctgcatattcctaaatctcctctaaaaagacagctaaggaacaaaacatgttcaaaaaatccatgcactatgaaagaaggtacaaaaggaaagaaatacatgaatcaaattctgagaaatgtgaagctgatggacaagaggcaactgacttaacacagcaaaaaccaccagtcagagcttaaaaagggagaagtcagtgaaatgaagacagatggggctggaaaagtgactgggcagatgagagtgctcactggtgctgctctctagaggacaggtgtttagttcccaacatgactcaggttccagagaatcagatacctctgctcacatgggcaagtgtgtgtgtttgtgcacacggacaaataaataataagtaaatatttaaaacctgtgaattcattcataccaaatacattcaagaaaagctaagaaatagatgtattattattttcaaaggcccaagtgagacatagaaaattaactatccttttcctaacacctccaaatgcaaaatttctgacaagtaaaattgtttcagaaaattttactagtttatcctaacttatttgttaggatacaaatacaaatcaaaatacaatctaaagtatgtaaggctaattataatctttattaatccttgcttagtaagaatattcatgttccatggaaggaaaaaagatcaatgtgtttaattacggcaactactgcaggtcccattaggtgatgtatcaattacatatcttattattttctaaaatctaaaaattaatctgaattctcaaatatgtctagccttgaggagtttctacaagacaccatgggactatataatgagccttttctagccccaaatccttcccttgccattctccatctcaacaagaaggggtctgctctctgggaaacggaattctaatctttgtggggtcttataccccaggctcacacatggcaccatcttgaaaaacgagacaggagagcccagttcccttactaggcttcacagataggaacaacaggcatgtatttgaattagtgaactttgtccatgtgtacaaactagagttcagtgttcagtgttctcttctatcactcccaacctgtttgtttgcttgtttgttgtttctattgttgagatagtctctcactaagtccagagcttattgtttcagctaggctggttggccaattaacttcaggaatcctgtccgaccttgcctatctcatgcctcacccctgccagttgggattatagatgtacctcttgcaatacctcgctttttacatgggcactggagatccaaacttgggttctcattcttgtgtagcttgcctgtcccctcctaagccatccctccagctcctagttctttgttttcagatttgggttggggtgtggtttggagatgagaccttgtgtcacctcatatataatactcctcctgagtgctagggttagaggtatataacactactcctgagtaaagattcattctttgccctcttgtcactgttgctctgagcctctatagtcacagtacaccatgccagagtgacaggaaaagaaaacagggtcctcaagtctcaatatccccttcaaaaatccccagtcaacagcctgacttccccaccagcctgacctctcaaaattctatcacttccaataatactacaggatgggaaccaaggaagggactttcaggacatttaagattcaaaagtgtagcagaattcttagcagaatgacacaggtttgaagattttcccctgagttaataaaaaatcaaagatctatacatttgacacttagggcttcccagaaagactgtggaaactccatctgctcaccttccacagtatctcacccaagtgtacagaactcttaaattggattgaatgagagtcaagagtcattagacatctgagaacatgaaagaataagtaaaaccattgggaaaatgaactcttggtaagagcatacccaaaactgtatttaataatcacagaaagataaaagattatatccttgagatgagaccaggaatagttttacctttaaaaatcttcagaaaataaacaacatgatctgatcatgggtataaaatatttatattgaacacaaacattagaaactaaaattgggcaaaacaatggccagaaataaagcaaaaaaccaaatgcatgataaaatgataaaaatcaatgcacacaatagtaaagcttaagactataatggacttttttaaaatcctaaagtttcccagataaaacaaatgtgccaacaacatatacataatttgtgattataataatcataatacaaactgttgcatcattgagaagtaggagatatttaaccagtctccaaaattctatgagaaattaatctctactacatttgtaattatgtattaatttaagcaataatataacatatatgtatattattgcttaaataatatatataaatagatggtacatacttaaagaaagccacataacaaggagaaaaaaaaaacatgaaatgaaaaaaaaaaaaaaacaggagactggattcaagcaaacagaagttggcatttcaaagaaaatacaactcctatgtaacagtgttattctgagcacaggtttaccgagcacctgttctgagatggagaacaatagagtgtctaaccacactgaaaaggctacaagaacaagcaaacaaaaggggtagttatcacagccagcacaaagaaagtagctgaaggaaagaaatgtggtggtcctagtcacccaggtggctcagccatgcatcatacttacacatcactcataggaatatcaaatcaaaaatggctaacacgactgcactagagcaatagagaagtatggggtgaatggagaggctgatcgttaatatgaggcaataaaatgctcattttccagattaggggcaaaagatactacctaaatttaaaactcaagaatgagctatttatgcttgatacttagaaataaggaaggagacctgggaagaaactgtgggctttgactcagagatacagcagctgctggatcagagcagaggttttatttttagttgaccaaatcaatctttatagtatagctcaaattaggtcttctctttaagagcaacagtaagtgaccaaactccctcattgggcatttacattcttcccagattatttcccagcactttctctcttactttgtagaaaactgtggagcagtagcttctgggtttggtggaagcacagtttatttttctcctccggtgttcaaatattggtcattcacagatcttttattggggtcctggttcccttgatatcctccttatcgtttttgaccttttgagtttttatttccgtttgtgtttggctttgtctgagcacttctttagtttccaccactacaatatggctcacactcttgaacatcatggggtgttagcagctcaatggcatgactgggactcttcacaactgcaccatgtttacagtgcctccctcctatcacgtgtgggctgcacagcttcctaccacagaataaccttggatttcccaaacaggaagactgatgaagtaaaggagatttcttcttccaagctgctgttttatagggatgtttaacattgccttgctaaattgggtcacatgatgagccaggcccccctcctatacccccaaatctccatgaactaattttgactaggacagaatacagtgcttctctctgtctctgtctctgtctctgtctctgtctctgtctctgtctctgtctctgtctctgtctctgtctctctctttctctgtgtgtctgtatgtgtgtctgtgtgtctgtctgtctctgtctctctcttacacacacacatacacacacacacacacacacacacacacacacacacacacatggaaatgaaagcagatgaagtcgagtgaatgtgtactgtttccattagcatgaccatgtcaaggataccaatgcatcagactcatgggaatggcaaagccttccctgggtgtgactcagggggatggcaagagcctcccctaggaacacagatgttgatggacagttgactgccatgtaaaaacagtacatgcaaaaagtaccaaccacagttcctcatcctggatgaacattttcgagagactgccacactacagagatcccctgaaaagatcagtgaagctgctgcctcctccactgtatataataaatgagcttagtgtctagactgctggtgcatctccatacaagcctgtggcctgccagatcccagctttaccttccctatgtctgtctctcttaatctcccatcattcccagtccagattaggcccagcctgccagccatggcaaactggaattcattttttattttgttttagtttgcatttttgatttgtctgagccattctttttctggcctatagtaaggttcttaatagaatttgtacacaagagaaatgaaaacagttctctctgcaggcacaaatgctgcatatgactagcgggcaatcttttccctttttcttggttttttaatgtaaaatcagtttgacagggccttggataaattgatttatcatgacatttgagagtgaattccttagtttgtgacatgtaagtggcagaaaacacaaaagcaaactgtacacctcgaaacactaaaggtatgctttaagctaaaagcttcaagaggagagccatgtgtttcaagggtttgctatactcattctaataaagattccacaaactgaaattcaccaggccaaatgttcatttttgctttgtttttggtgtgttgaattaggctaagttggactaaaatccatagttactgagccagacagcattccaggcattgctttgaaggcattctgtagattaatggaagcccctcacctgttgagcttcaattaggcagattgcctctcatcatctcagtaggcctgatctgagaggcaggaagacattaagagcaaggctgagtttcaggcagatcatagaaattttccctgtgggtagcttccactcagaagaatatactcgagtttacctctcctaacaccatccatggactttcttaaccagctctcacagtgtgaaaggtaagtctttgtgatatctcttcctcagtctcatcttctttaatacaacctttcccttttcatccccccatcaagcttgtagctacctttcattgatccactcacctaactacctatctaccttaatacttattatccatctgcctagcatctaccatctatctatatctattatctccctatatactatctgtctatcagtcatgtagcatctcactcatcttacttctctggttgaatgctgatttatgtacttaaactgcttcaaacaggaccatcttcttgtttaatattattccttcttcaccttaatatttcttttcaattctttatttcttacttttcttcattcattttgtgttgaagttgggggtaccaagtgcccaatcacggtgtgtgtgtgtgtgtgtgtgtgtgtgtgtgtgtgtgtgacaggtcagaaggacaacttgaagggatcaggtctctccttccactgtgtgagctttgggatcagccttgggtcctcgggattgataacaagcaccattatctattgacccaccttgctgactttacactaatgtgtctataattcgttttctcttaaaattattctttagaatataaataaagaataaatggttctgtgctccagtatccacaaatcacaggacacaaattctctagacggaaagttctcacaagtctggctaatacagtagagaattgagaaatggttgtgttagggagaaactaggacagagtttgaaggtgaggctatgcattcacaagatgaaaaataattcatgttgacgttttgacaaaataaatatatttcaaacatccactggtcctgggtgttttgggtcctacatgaagttgttgacacagtgggagaagtaagcaagagtccaaggctgattcagttcagctcttgtctttcaacaggggtcaaataatagtgtttgtatttgtctgaaaactaaagtttaactgccttagaagtgacaagattccaggccattttctatgacatttcttcactctttattgcacatttgaaagagaacataataaacctcagaagttattgtttcctgtggatccatctcaggcagtaatttttggaccaaaatcaaagtagctcggggttttaggtaggatatctggaactgaaagcaacaagaatgccccctatctctctcctctgttttttcactttctttcactgaataccatttgttaacctcattttctacctttgttactagcatataagttgtaggccagagactctatatgaacttcagtgtattccagaagttagtataatgtctggcacacagtaaatgctgttgaacagtacatgcattgttcctgtgtctataatacaggcataatgatagtgcccaacctcctagcttataattatagggaatagacagttttttttttttttaggaatagacattttgtatgatattctttaaattcctagtcaacatgaactctagctttccatgtgggcatcaatatttgcttcattacagattgtatatgatatagagaaatatggaacagaaataaaatatcaatcagttctggttttctgaagactttactatactgttttcaatttattgaattcattatcagggtttttgtcttgggttgtgagctattgaaggactgtttgtttcaaacaagtcccatatcaaataagaattgatgtagagccttttgctggttatcatttagtcaaatcagacagctggtcaacaaatgggatgattgttgccttccatgatgctggagatggtgaaatattaaaaatagatatgacattttctagtaattaatatcaacaagtattttggatttgtagcctgagcactcttcattgtatttggcagtctgccctcttctttgttgggtggaactgaagagaaaatagatacattttctgtaatcaaacactgaatggagctttcacaacaaactcatttgagtattcaccttgacccctcagatcaaggagcaaaaatttgccaggccacatttttcaatactctgccatggaaatgaatgatccaaagttaaataaaaagtgatcgtgtataaagtccacagagtcaaccacaggaatctcagcgctagctgtatctgagtaacaggtttatctgatatggttgttgacatccccttgttttctgcagtgatcatgcattattcatgctctgataataaaaagaataaaaaggattttgtttcttagaggtaatagaaattttacaactgcctgcagagtcttatttcattaactagagagaatgggggggtggtaaaaagcaaagaggagtttgaaacatgaaagtaggtaaacatgggtcatgcaagaaatatatagtcaagagtccagtaaacaaactccttggcagcagagttaacttaaagcatttataagcaacttctcttagcccttctgatatttttctgtaaatggcaggatatcattgttttcagaggttgccaagctgttggcaggggacaaaacacaaagtgtatttttcactcgtaatattttactttaaaacaccattgatcttaagctacctccccaattgcaaattggtggcttttcgagtaatttataggaaaacactatgaagtttatctttgaaatgaaatgaaataatacctgcacttcctactttggggaaattttatgttaaatcacccggacaggcagagatgacaaaacattgagacatatttagagatttcatttctcttcctgataacgacaaggttgattttgtgctctcagaggggaaatcatatctgatttaccatcagctgcctccatgccaccagccacatttcacattctttaaacagccacagctcggtgatgccgactaccctttactgtggggttgatcaactgccaaatgcctgacgaatcacggaacactttcactctcagctacctgtttctttatcgtgataaagcaggatgtgcagcaagaggcaaactgtcataattttattggcgaacgaagtctgatttacaccaccttgcttctcggtgcaagaactaaaagcatccgtgaaaggggcagtctatagcaagcttccacttcccttcctcttgctcttctgattagccttttccaagcagaagaatagctcactcccttccaaggcaccatctgaggaatgtttaggtcagatatttaaggaagcccaagacagcataaggaaagtaaccctgactgcccttattcaaataacccacaaattcctattctgatcatgaatctcaagcagacctacagtgtgaactgaggggaagccatagcggaacaggctgtgtatgtaaatgtccagcagaaaggaattgaaatattcaaccattttacaaagctcacaggtggaacaagatgtcgaggtggaattactgtttagaggaaagcatgtgttttttcgggtttcatctccagctgaatctagaagttatgatatatgccttaaaaataaatttaaaaaataggtatacctcctcttcactcctccccactgctgtgcatgcccaagtcaacatttcatctcatctgagttttacgctgtggaaatttcaggaaacaaatgaggacggcaaatgatgacctactatgttagtcaagacatatcagataaaggttgtggctacccactggtgtttctttgttggatagatgaaggcaggacatagaaaagtgtttgcagaaccagaatggacacgcaggaaaattctgaacttgtcgcttaaaaggaaaatggaaaatcagaatggtagatgctcgtttggatccaagtgatagttaattgcctatttccctgaactgtttgaaagagctataccaaattttctttgccttgtcatttaaaacacttaattctctttgcacttcccaaccaacttggcacttctgccatctattgaagacctagctaatttcctagtcatctgttgatcaatttagtggtgttactagacaacctctgagtttcaaacattaaaatctgactatctctccttacctttgaagcaaggtaagcagagcgaagttaatctgttcagatggccatcacctgctctgcaaaagaaaaaaaaaggaagctgtaaaaaattgtgttggcatgtctagacaaagcaaatattcactgggaagattgctgcaaggtcaggggcctgccaatttaccgttggtaagcattagaaatggatactgtaaagaaaagttgaagcgttctcatcttaaaatatgcaaaggagccttcaatggacttgacagattggccattggattcttcttaagcccttgatatttggttcattgattttcaagtattctgacatttttctttcattactataccacagcctagtgcctttccctcctaccttgagtttttcaatttctgaaccccaattcttatagcttgtgttaccatgaatatgccacaaacatgattatctacaggaaaatgtttgtctattatttatagtctccctctactttccctcccccccctcatcctggggctggtagtttcttcatcttgctgcacagtgtcactgtgaatgacaggaaataaaggacggctgaacttactcacaaaaataaagaatcctttgtggaagatgaggtaggggacagcagcaagggtgaagataaaggttatggaaagaaatgaaagagaagaggtagctgtgttgagaaggaatcttggggaaagtactgaaatattgaaaagcagttaagaagtttggctgtgggctgtgtcttacctggcttgtgtttacaagaccttgttgaattccatattcaccaatgtttctgaagctggttttgtatctgagcagtttgagtggcttttgtttgtgttcatctctctatgactttcaaagacaagatattttgatctctttcctctgtagaaaaaagaataaaactatcacagtatcacaacttctgtgtcatgtaagacccaagtcctcggctttctgctagtatgcttccttcccatgccaacctcaggcatctgaaactcaacctgcctacacctaaactcaaaatttttcatcttgtctcccaattccctctcaaaaataacagtaccatccacctactcgtatatgtcatgaatattgaaggagagcccttgtatttctcattgtgtctcaggcagtcaccatgctctagctctttactaccctcaggatctctttactccactttctcttccttaagcaccataatccccaggaactattgctaaatcttctagactttaccccctttcaatcagagtaatctttaaatgtgacagactcattagagcaactcctaccatttcttgttttggctgacaaaggatttaggcttgttttccacccattttcactatcctctcttctttcttctcttgtttgttcatgattgatccctgtttcattcctccaaagagctaagtatccccctgtacatgctgttctaagtaaaagcccagccccaactcaaccccagtttatcttacctatcgtttctcccacccactcttctgttctagactttcagttggtaagtcattctcttcagataagtgtacatccctaacactcctgtcccacccctcgcccctcccaggctgttatttctcctcattagcatctctgcttgtatagtcaacatttttttcctacagaatttattgcatttataattagataaccttttctctaattatttaatgtctgctttcatggcagactctcagttatatgatttataatgttaatgccagtattatactggtgaattgctaattatttagtgttgtatagaccctcatttctgagatggctatttctgtcatagaatcttttaaggctaagacattaaaacttaaaagttctctatgaacagtttacctgaacaaggggttgctcatggactccagactgatagttgggaaaccagcataggactgtttcagaccccctgaaggaggaggtcagtttgaagatctgggcaatctatggggccaccggtagtggatcagtatttactcctagtacacaaatggacttttggagccctctccatatggagggatactctctcagcctagacacaagggggagggtctaagccctgctccaaatgatatgacacactttgaagatcccccatgaaaggcctcaccctccctgcggagcagaaagaggttgggatagggcgtcgctgggggacaaggtgggagggagagggaactgagattgacatgtaaaacaagcttgtttctaatttaaataaaaaataaataagtaaataaataataaaagtatcatacttatatttactatttctatttctctgcttactctaggagaaagactctaagacatctaatgaaactagaaactaagattaagatgtgtatgagactaaaataaaaattctggagccatcaaaggaatagtactttccttcaaagagcatgtcagtcacttacaaggacaagatttcacatctccaagctcggcacttgcacctgtagtgaggaatataccctatccatttcaattcagactatcatcctcattgccgagcaggctcacaaatggagttcattagtgccacgtgggatggcagggttctggttccatcatcatatttgctaataaatgagctgataagtaaaattccctaaaatctctcttcatctagaatatattgtaaaatatcaaagttgaggtgatgatgtacttcacagtatttcagatgtaataaagcttaaatctctcactgcaaaatggaaagtatgtgcagtgagctatctttttaacacaaaatatttggggggctaataacccatggcacactgctcatcaacatggaccaagaaaaaagacatctttaaagtcaacgtgactctattatcaccagtacattctgtctttgcctccaagagaatccagacctgcagatatcctcacagatacctcctgtgtcttttactggaaaactactttcctcctttgatagacattatgggcattgtctaatcttttctttgatacaaatttaatgtatgttcaataaatgtttatggcatatgttgcttcagactgttgaaaactgaaatagaaggtgaatcgtcacagctttaaaactatatagcatgtttggtatgaataacttccatgcacccatatacacaaaactagcagacaactaattttaaaagtatgtgcttctgatctgggtggtggtggcacacgcctttaagcccagcactctggaggcaaaggcaggctgatcattgtgagttcaaggccagcctggtctacagagctagttccaggacatactccaaagctacagagaaacactgtctggataaacaaaagcaaaaacattggggaaaaaaatacatgcttctgatacagatcttcaggtggatattaagtgaatttcctaacaaaattaaagtcaaaacttcattaaagatgacaaattacctatacttacacctatagataacttaaaaggttgggcggaggggagtaaaaggtaacaaatggctggtgtttgggggcagtaagagaaaatattggaaaaatagggacacgttaagaaatatttcaccttaaatgcccatcccctataatgagaatgatgactatcttaaatgccatcctagagccttcaaccaatagctgatggaagtagaagcagagctccacagccaagcactgaactaaactcctggaatccagtttcagagagggaggagtgaccaacaaagaccacgctgggaaaacccgcagaaacacctgacctgagcaactgggaactcatggacccctgactgacagctggggaaccaaacataggaccaaaccaggcctcctgatcgtgggtgttgttagtcaggagcactgtgcagtctacggggcctctggcagtggaaccaggatgtgtccccagtgcacgagaggacttccgtagcccatttcccatggagggatactctcttagcctagatacacaggggagggcttaggttctgccccaaatgacttgacagattttagtgatccctcctggaaagcctcaccctccttggggagtggatgggggatgaaagggagagggaactgggattgatatgtaaaataagattgtttctgacttaaattgacttacatttgagagagagagagagagagagagagagagagagagagagagaagagagagagagagagagagagattgagagagagagaatgagagagagaggagagggagggagagagataaagagacagcgagagagggcaagagagaaatatttcacataccaaaatgagaacatgtgagcaagatcagcagggatgaagcatggctagagatttagacatatggttgattcaattggtagagtgactgcctggcatgcataaggccttggctttgggtttcatcccagcatgatataaactgcgcatggtggcacacatctgcaatcccagcactagggaggtagatgcaggaagaacagaagttcaaggatatcctcagctacagaatgagtctgaagacagcctgggttacatgagagtctgtctcaaaaaaaaaataatagtggggaatgctatacttttaagcagtgtcataaaaggtaccacaaagattcgtcgattaaggaatagacttgccaatgcaagaaaaaatttgtgatgtctaaaatgatcaaaacattgattgacttatatacactgagaataaatatcacaaaaatagatagaaaagaatactaaaaaataagaatcagtttccatgacaaatgtactgtgatcttaggggagatagatcataaagattaaaattacttcaatataaccatatttaaaattggaaataattgcaatttaatactacacaaaaagtggaggaggtagaaggctcaatgattaagagtgcttactgctcttatagagaacccaggtttgcttccctcagagaggtcacaactcctgtaactcctgccgcatgggctccaacaggctcttctggcctccataggcccctgcatgaatgaggtgagcctaaatacacttaggcacacatctacacacattgaataaataaacaaataaataaatgtttctaaaaactgaaggaacctgtccactgccaaaatgtttgaggtgagatgtctccagtaatccatgcactccaaatcctctgtaaggttcaggagtcatttctattttatttctaccagaagtgagaacacttcctatgatgctagtaatcccttcctctgttgacttgatatttacccttctgtagcttagacgtagctgacatctaaaaggtccatgttttcttttctgaaaacacattggacaaaaatctgttcagaaccctttcatgtgatgattgttcaaaaactctgagagtcattgcatcattgtattgtagattttaaataatctactatttacagcatacaaaactcattaacataattaataaatgcctgtgttattaatgataatttctaaggcatcacaaatatctgccaacagatttactgatgctatttcagtttacagttagatttatggcttcctcttgttttaaaaaaatacagacaactttctttccctgagagctaagaatatgaaaactctattctaaatcaaaatgtcctgagtttaatgaaaaccaggaacagaaagtctaagggcctgtggtcgggctcctaacttgaaagaataaattaaaaagcatcaaattcaattttcccaaagattgtgattttctatttgtatgtgctacaaatttggcaggctatacagatttggaaaaattattattatttttccaatacttccaaaaatgtatttgcttctaaaccttagggtgcattcaggtaaaagaaaaaaatctatttacgtatccattatctctgggtagaggctgagtttgatgaacgctccatacaactaacaaatgtttgcctgcccagatggcttttgctctagcgttatgcctcagaaaataaattattattattatttatgctcatcataaaccatgtctgcataacaagtttctcacaggagttgaaactagtttttgctgattctacaacacatctcatttgtaaatgtcagaaaactgtacctttgttgttctgagtgttagatgcatggaagcaaaagtgagtgttcagtgtgtccatgcgtagagacactcatgaatcaacactctgaaatatgaaaagccatccagtgtcagctgtgcttataaaataaaactattagaaactttaaaactaccaagtactgtatgtacctgctgcaagaccaagatttcttgatgtggaaggaagagtctatccccaaagataagatttcaaaataagaaacaactttgaactcttatagtagacaatataatggcttgtttaggaaaagcagttgctaaattatagtagaagaaataaagagagttctgttttatcccccactctgaatccaacccaaagctagttatttatcccacctgtaaagtgaaataaaactgcacactacaatactgtcccagaaggataggtggggattaatctcctggaagtgtctggagtttcacaaatgttgtggtgatatacaaattgtggtaccttcattttgcttttataacacattcatgggcctaacacactggagggtaccttaactgcccaggcagttcatcaacacacactcagcacccctcttcagcatctcctgaggattagctgaaaaccaagctaaaattactgtttagtgactgcacattaaatcacacaaggttgagatatccaaggtctcaatttacttttgtaatacaaaattaaccttgtaggtgcaaaattacagtattattttataattatagctgtggtccctatatttatgagatattacaaaacacctgaccttcccaatacaggctagctaattattttgtatccaactagaacaagttcattaaacttgaatctcagtgaaactgtggctaacgcttcatcttaacaggttccattgtcattgttcctggagtattaattaaatttagtattcaagcatgaatttaaaatctaaaggacctagccaagtacaccagtgactatttgttgtttatggcatcagatatacaatgtaaaaggactataaataacttgatatttatctgcgtgttgtcatttttatctcctttactagaacaaaagctacttcagggaggcaaaattcagggcttatttgtaatatatgtgtttctaaatatagctccaaagaaaaacctttgtaaatgggaaacaaaatatttgttgacttgaacaatagtaggttgaaatgaaagatgcagattttccagtcagttgtattagtgagtaaaggctgtcagacatcagtcatattcttataatatgcatttcaaccaattataagcctaagacctaaagttctgtacaatgaaactattacttgccttttagcttcacagtcacttctgaaggagtataccatagtgttcaagcatgtgatgttgtacaatcaaaaatccaatctcattagaatgcatagaggtgaggtgtagaaatccttcttaattacagaaggttgaggataatatagaaatcatcctttcttactcttgaatttcaaatatgcataatgataagaaacacttcaatgttcacatgtaaaaaattaactaaattaaaactgattgttgaaatttattttgtaagtataaagctaagaaaactattcttgacctttgtaatgccctttttgtgatttttttcaacctgaaacttcatataatctacttctttttttactatataaaaatgcaagaaccatttgcttgccagtctttctgtgagtagaactcatagcaagtctgtgttattaatatgaaagttttaatttaagaattttaatatacatcacagaaatccttttgataaaataggaaaattcaaggctcacttattaagacatggctatgaaattaacttcacttattctgaaagaatttccatcttaaccatatatattccatattctttcataaggttgatgcaggaccaatttgatattactcaagtgtgcttcaatgcaagtttaatttccactaagaatagtagaatggtatgtttcatttctgctaagaatggaaaaatatgagacagtggtagaaatgcaaatgaaatataaaagttgaactcgaagagcttaaaagtaaacttacagaaactgtactcagactcacgacatgattaagaattattaacaataacaagtcaacacatacatactatagaacacagactattcatggattgtgcaagtccttcagatcaaaagccctaatagctaatgctggagactgtttcatggtcatcagtgcccacacataggcttagtgggtcacagtcgattaagaccagcttcatttcatgttctctgtaaagacaatgatataggcataatatctacattgaaatagtggatgggtaaggacaagaagatgaccaaagatcaggttgtaagagttgtcccatgtcacatcaccattgatcctctgataactcatatattgaacccttgtattgaggagctttatatcatgatgacaaaataaacaaagaagaaaagaataattttggttcactgtctgagtttccagttcagtttcacttagcactgttgctttgggcctgtaggaggctcactgtatgtaggaacatgtgatataggaggtttgttccctcagggcagatagttagcccaatagaggcgaaggtcccaaagtcttaatactcagttccagaacactccaccagtagtctaacttctactgacttttaggctctgactcttaaagttctcagtccctatcagtagcaccattagaagaataaacctacaatacactggcttgttgtgcatttattcaaaccatggtgcccccctttgtttaacattattcagtttacctcagagtaataaaagcatattaaatatcaacaggaaaatcagtaactataagaactctttacttgaaagatcaaatggtaggacaactgattttctagtctctcttcctgcctcaagacaaaaacacatcttcctatcattttattcacagtaaataccaaagtgatcttgagttattattgtgatcagataatttaaacaaacaataaaaaaaacaggcaacagacttgttgtctttgtgaaagttcaactgcttgggaagaattggttgtgcttttctctctgccttccaattctgatgctcagtataaatttattgacttcactttgcgacaacttggtcctggatgaagcacctttcaagagtggaaaacaacaacaaaatcaaagactgaaaccagtgctaaatataaaaaccaaggaaagtcaaaagtgagaaaagggtaccaagcagacaagatccaaccattattagaaccatctgaaacacagaatttcttctagaaagaacttaaagtgaaaactcttttttttcaattatcaaatcattccatttctctgatagtgtttgtgctatatctgtttattttcattagttaagatttcattgccatgataacatacctgacaagaagccctctaatggaggaaaggcttattttgactctcagatagtaaatagcccatcatgccagaaaaggcatggcagcgagatcatgacataggtagccacaccatttccacagctgagaggcaaaaagagagaagaagtgaagttggctggaaagcttcaaggccctccagacccagtgacccactttctccaacaaggctccacctcctgctgtttccacagccttcacaaaccaccagcatctgggagtcaaatgtccaaaaacatgagctcctgggggacatctcacattcaaaccacaacactactgaaacaatatgtcaaaggaccttaagtgttattgtctaattgactccagtaataaatggaggcaagctcagggcatggatcccccacactttacttatgttttgctttagagtccttcaaagacttgataagcctactcttgcaggagcccacctcacaggtacgttttagctcttagggaaagctgcctatgtactttttcaacatttgtttatattattttatgtgtatgagtgtttgcctgcatgtatgtacacataccacttatgtgccttgtgcctttagaggccagaagagatcttgtgatgcccatagaactggattacagatggttgtaagacatcatgcaagtgttcagaaccaaaccagggttctctaccagagtaccaatggctctcaaccacagagtcaactctccagctctgagatttttgtttataaataatgcaaagttggtatctattattcatccttaataaatttaataaatgctgggctgagggaagtagacaaaggagattgttaatgacttaaatatcttaagtcagatgtaactatacctttagtatctttaagcccttgggaagcagaggcaggtgaatctctgaggtgctattttgtttatgatctaataaagcttacctggagatcacagtacaaagctagccacagtcatagaggccaggcagtgttggcacacacctttaattccagcactcaggagacagaggcagatggaactctatgagttcaaggccactctgggctacatgagagtgtatcagtctaaaagagtaacagagttcatacctttaataccagcacttgggatgacatgcccttaatcctagaactagggaggtgaagacatttcctggattgtcagatcgcgtcatccttgtaggtctctggagatctccctagttccagatctcttctcagacctatagtggctccctctgatatggtatctctcatcctgctctctctcctctattcttcccccaactcaatatttctgctcctccatttcctctcctctactcctcttctcttgctcttgtggcagctccctctcccctaccctcatgctaccgattagctcaggagttcatgccacttcccattcctggggaccatttatcccttagagtccttcatgtttcctagttctttggtgaagaggagtatagactggtaatcctttgctctatgtctaaaattcnnnnnnnnnnnnnnnnnnnnnnnnnnnnnnnnnnnnnnnnnnnnnnnnnnnnnnnnnnnnnnnnnnnnnnnnnnnnnnnnnnnnnnnnnnnnnnnnnnnnnnnnnnnnnnnnnnnnnnnnnnnnnnnnnnnnnnnnnnnnnnnnnnnnnnnnnnnnnnnnnnnnnnnnnnnnnnnnnnnnnnnnnnnnnnnnnnnnnnnnnnnnnnnnnnnnnnnnnnnnnnnnnnnnnnnnnnnnnnnnnnnnnnnnnnnnnnnnnnnnnnnnnnnnnnnnnnnnnnnnnnnnnnnnnnnnnnnnnnnnnnnnnnnnnnnnnnnnnnnnnnnnnnnnnnnnnnnnnnnnnnnnnnnnnnnnnnnnnnnnnnnnnnnnnnnnnnnnnnnnnnnnnnnnnnnnnnnnnnnnnnnnnnnnnnnnnnnnnnnnnnnnnnnnnnnnnnnnnnnnnnnnnnnnnnnnnnnnnnnnnnnnnnnnnnnnnnnnnnnnnnnnnnnnnnnnnnnnnnnnnnnnnnnnnnnnnnnnnnnnnnnnnnnnnnnnnnnnnnnnnnnnnnnnnnnnnnnnnnnnnnnnnnnnnnnnnnnnnnnnnnnnnnnnnnnnnnnnnnnnnnnnnnnnnnnnnnnnnnnnnnnnnnnnnnnnnnnnnnnnnnnnnnnnnnnnnnnnnnnnnnnnnnnnnnnnnnnnnnnnnnnnnnnnnnnnnnnnnnnnnnnnnnnnnnnnnnnnnnnnnnnnnnnnnnnnnnnnnnnnnnnnnnnnnnnnnnnnnnnnnnnnnnnnnnnnnnnnnnnnnnnnnnnnnnnnnnnnnnnnnnnnnnnnnnnnnnnnnnnnnnnnnnnnnnnnnnnnnnnnnnnnnnnnnnnnnnnnnnnnnnnnnnnnnnnnnnnnnnnnnnnnnnnnnnnnnnnnnnnnnnnnnnnnnnnnnnnnnnnnnnnnnnnnnnnnnnnnnnnnnnnnnnnnnnnnnnnnnnnnnnnnnnnnnnnnnnnnnnnnnnnnnnnnnnnnnnnnnnnnnnnnnnnnnnnnnnnnnnnnnnnnnnnnnnnnnnnnnnnnnnnnnnnnnnnnnnnnnnnnnnnnnnnnnnnnnnnnnnnnnnnnnnnnnnnnnnnnnnnnnnnnnnnnnnnnnnnnnnnnnnnnnnnnnnnnnnnnnnnnnnnnnnnnnnnnnnnnnnnnnnnnnnnnnnnnnnnnnnnnnnnnnnnnnnnnnnnnnnnnnnnnnnnnnnnnnnnnnnnnnnnnnnnnnnnnnnnnnnnnnnnnnnnnnnnnnnnnnnnnnnnnnnnnnnnnnnnnnnnnnnnnnnnnnnnnnnnnnnnnnnnnnnnnnnnnnnnnnnnnnnnnnnnnnnnnnnnnnnnnnnnnnnnnnnnnnnnnnnnnnnnnnnnnnnnnnnnnnnnnnnnnnnnnnnnnnnnnnnnnnnnnnnnnnnnnnnnnnnnnnnnnnnnnnnnnnnnnnnnnnnnnnnnnnnnnnnnnnnnnnnnnnnnnnnnnnnnnnnnnnnnnnnnnnnnnnnnnnnnnnnnnnnnnnnnnnnnnnnnnnnnnnnnnnnnnnnnnnnnnnnnnnnnnnnnnnnnnnnnnnnnnnnnnnnnnnnnnnnnnnnnnnnnnnnnnnnnnnnnnnnnnnnnnnnnnnnnnnnnnnnnnnnnnnnnnnnnnnnnnnnacactccagaacctttatcatgaaggggtgttgaattttgtcaaaggttttctcagcatctagtgagatgatcatgtggtttttctttctcagtttatttatatgatggattccagtgatggatattcatatgttgaaccatccttgcatccctgggatgaagcctacttgatnnnnnnnnnnnnnnnnnnnnnnnnnnnnnnnnnnnnnnnnnnnnnnnnnnnnnnnnnnnnnnnnnnnnnnnnnnnnnnnnnnnnnnnnnnnnnnnnagtcatatctttgtgtggcttgggtatcaaagtgattgtagcctcgtagaaagagtttggcaatatcccatctgcttctattgtgaggaacagtttgaggagtgctggaattagttgttgtttgaatttctggtagaattctgcaatgaagccatttggccctgggcttttttggttgggaggcttttgatgactgcttctatttcattaagggttatagattgatttaaactgtttatctgttcttgatttaattttggtaagtgatatttatccagaaagatttcttttacaaatgtgtccatttcctttagattttccaattttgtggagtacaggttttcaaagtatgacttgaagattctctggatttcctcagtgtccgttgttatatcccccttttcatttctgattttgttaattagcatgctctctctgtcttttagttagttttgctagaggtttgtctaacttgtttatcttctcaaagaaccaactctttgtttcattgcttctttgtactnnnnnnnnnnnnnnnnnnnnnnnnnnnnnnnnnnnnnnnnnnnnnnnnnnnnnnnnnnnnnnnnnnnnnnnnnnnnnnnnnnnnnnnnnnnnnnnnnnnnnnnnnnnnnnnnnnnnnnnnnnnnnnnnnnnnnnnnnnnnnnnnnnnnnnnnnnnnnnnnnnnnnnnnnnnnnnnnnnnnnnnnnnnnnnnnnnnnnnnnnnnnnnnnnnnnnnnnnnnnnnnnnnnnnnnnnnnnnnnnnnnnnnnnnnnnnnnnnnnnnnnnnnnnnnnnnnnnnnnnnnnnnnnnnnnnnnnnnnnnnnnnnnnnnnnnnnnnnnnnnnnnnnnnnnnnnnnnnnnnnnnnnnnnnnnnnnnnnnnnnnnnnnnnnnnnnnnnnnnnnnnnnnnnnnnnnnnnnnnnnnnnnnnnnnnnnnnnnnnnnnnnnnnnnnnnnnnnnnnnnnnnnnnnnnnnnnnnnnnnnnnnnnnnnnnnnnnnnnnnnnnnnnnnnnnnnnnnnnnnnnnnnnnnnnnnnnnnnnnnnnnnnnnnnnnnnnnnnnnnnnnnnnnnnnnnnnnnnnnnnnnnnnnnnnnnnnnnnnnnnnnnnnnnnnnnnnnnnnnnnnnnnnnnnnnnnnnnnnnnnnnnnnnnnnnnnnnnnnnnnnnnnnnnnnnnnnnnnnnnnnnnnnnnnnnnnnnnnnnnnnnnnnnnnnnnnnnnnnnnnnnnnnnnnnnnnnnnnnnnnnnnnnnnnnnnnnnnnnnnnnnnnnnnnnnnnnnnnnnnnnnnnnnnnnnnnnnnnnnnnnnnnnnnnnnnnnnnnnnnnnnnnnnnnnnnnnnnnnnnnnnnnnnnnnnnnnnnnnnnnnnnnnnnnnnnnnnnnnnnnnnnnnnnnnnnnnnnnnnnnnnnnnnnnnnnnnnnnnnnnnnnnnnnnnnnnnnnnnnnnnnnnnnnnnnnnnnnnnnnnnnnnnnnnnnnnnnnnnnnnnnnnnnnnnnnnnnnnnnnnnnnnnnnnnnnnnnnnnnnnnnnnnnnnnnnnnnnnnnnnnnnnnnnnnnnnnnnnnnnnnnnnnnnnnnnnnnnnnnnnnnnnnnnnnnnnnnnnnnnnnnnnnnnnnnnnnnnnnnnnnnnnnnnnnnnnnnnnnnnnnnnnnnnnnnnnnnnnnnnnnnnnnnnnnnnnnnnnnnnnnnnnnnnnnnnnnnnnnnnnnnnnnnnnnnnnnnnnnnnnnnnnnnnnnnnnnnnnnnnnnnnnnnnnnnnnnnnnnnnnnnnnnnnnnnnnnnnnnnnnnnnnnnnnnnnnnnnnnnnnnnnnnnnnnnnnnnnnnnnnnnnnnnnnnnnnnnnnnnnnnnnnnnnnnnnnnnnnnnnnnnnnnnnnnnnnnnnnnnnnnnnnnnnnnnnnnnnnnnnnnnnnnnnnnnnnnnnnnnnnnnnnnnnnnnnnnnnnnnnnnnnnnnnnnnnnnnnnnnnnnnnnnnnnnnnnnnnnnnnnnnnnnnnnnnnnnnnnnnnnnnnnnnnnnnnnnnnnnnnnnnnnnnnnnnnnnnnnnnnnnnnnnnnnnnnnnnnnnnnnnnnnnnnnnnnnnnnnnnnnnnnnnnnnnnnnnnnnnnnnnnnnnnnnnnnnnnnnnnnnnnnnnnnnnnnnnnnnnnnnnnnnnnnnnnnnnnnnnnnnnnnnnnnnnnnnnnnnnnnnnnnnnnnnnnnnnnnnnnnnnnnnnnnnnnnnnnnnnnnnnnnnnnnnnnnnnnnnnnnnnnnnnnnnnnnnnnnnnnnnnnnnnnnnnnnnnnnnnnnnnnnnnnnnnnnnnnnnnnnnnnnnnnnnnnnnnnnnnnnnnnnnnnnnnnnnnnnnnnnnnnnnnnnnnnnnnnnnnnnnnnnnnnnnctagctttaatgcatggtggtctgataagatacagggggttatttcaatacttttgtacctgtggaggtttgctttgctgccaactatgtggtcaatttttgagaaggttccatgtggcgctgagaagaaggtatattcttttgtgtttggatggaatgttctatagatatctgttaaatacagttgggtcataacttctgtcagatcctttgtttcttcctgtctagtggtgtaagcggggtgttgaagtctcctactctaagtgtgtgtggttttatgtgtggtttgagcttcagttatgtttcttttacaaatgggggtgccttcatatttgggacaaagatgttcaggattgagacttcataaagatagacttttcctgtgatgagtatgaaatgcccttcttcatctcttctgnnnnnnnnnnnnnnnnnnnnnnnnnnnnnnnnnnnnnnnnnnnnnnnnnnnnnnnnnnnnnnnnnnnnnnnnnnnnnnnnnnnnnnnnnnnnnnnnnnnnnnnnnnnnnnnnnnnnnnnnnnnnnnnnnnnnnnnnnnnnnnnnnnnnnnnnnnnnnnnnnnnnnnnnnnnnnnnnnnnnnnnnnnnnnnnnnnnnnnnnnnnnnnnnnnnnnnnnnnnnnnnnnnnnnnnnnnnnnnnnnnnnnnnnnnnnnnnnnnnnnnnnnnnnnnnnnnnnnnnnnnnnnnnnnnnnnnnnnnnnnnnnnnnnnnnnnnnnnnnnnnnnnnnnnnnnnnnnnnnnnnnnnnnnnnnnnnnnnnnnnnnnnnnnnnnnnnnnnnnnnnnnnnnnnnnnnnnnnnnnnnnnnnnnnnnnnnnnnnnnnnnnnnnnnnnnnnnnnnnnnnnnnnnnnnnnnnnnnnnnnnnnnnnnnnnnnnnnnnnnnnnnnnnnnnnnnnnnnnnnnnnnnnnnnnnnnnnnnnnnnnnnnnnnnnnnnnnnnnnnnnnnnnnnnnnnnnnnnnnnnnnnnnnnnnnnnnnnnnnnnnnnnnnnnnnnnnnnnnnnnnnnnnnnnnnnnnnnnnnnnnnnnnnnnnnnnnnnnnnnnnnnnnnnnnnnnnnnnnnnnnnnnnnnnnnnnnnnnnnnnnnnnnnnnnnnnnnnnnnnnnnnnnnnnnnnnnnaagttttcttctatgattttgttgaatatgttttctgtacctttgagcagtgtttctttaccttctccaacacatattattcttaggtttggtctttgcaggtgtcccatatttcctggatattttgtgttagggatttgttggacttgaggttttctttggttgatgaatgtatatcctctagcgagtcttcattcaatagctgacattctctcttccatctcttgaattctgttggttatactcacatctgtagttcctgatcatttagccagcttttctatttctagcattccctcagattgtgctttctttattgtctctatttcagtttttaagtcttgaactgtttccttgagagatttgttgatatcttgtattttttgttttttttnnnnnnnnnnnnnnnnnnnnnnnnnnnnnnnnnnnnnnnnnnnnnnnnnnnnnnnnnnnnnnnnnnnnnnnnnnnnnnnnnnnnnnnnnnnnnnnnnnnnnnggattttcttgtttcctctttaaaggtctctatcatcttgctgagataatttttgaggtccatctcatcttcatgctctgtgttgggcttttcagatcttgctggagtggagtccctagattctggtggtgtcatattggtctttctgttgttgagtgaactcttattctgtcttcttcccatatcttcttttagtgggtgcaggtggggtctctctatctcctcttgtgacccagtagtgtgtgggagccaggaattcaatgtccacaactgtggatggtcttgcctctcctggtagtctcctcactcgttgtggatcggttgggggaaagaagtgggagaggggggtgtttccagattcagggagctcctccttgtctgtgcgtgtctaccccaagcaggtgggctcaggcccggggtggtcagggtgagtgatggtttgggtaggggttgggtaagggcagaggctcactcacctcattcctgggtcagtcgttggactaaaatgattttttttgctttgtttttttaaagacagggtttctccatgtagccttagttgtcccggaacttactgtgtagaccacactggccacagactcacagcgatccacctgtctctgcctcctaggtgtaaaggtgtgtgagctaccacttcccattttttttttaaagaaaagaactgaaatatgttaacatttaactatcttagaatctagctatacaagaagtccatcccaggactgtaactgttgttagataattataagtagtaatacttttcaaatccttctaaaattatctaataagttcttggcatatgtaatgtctaaaagtaattccatgtaccaaagaaccaatgttattagcataaagaatgaaaggtacaagaggaagggcaatcctgggaaatggttttcaccatagccccaccacacactgctccttcactcaccctgggcatctttaatggagtgtgtatatgtatctatatacaaggaattctgggccaacctattaggaatgcagcctgataaggacaagacaacaagtgggggttcatacaccatgtgtataaataagtaaaagttagaaccccagcaaaaacgatttaacacaatgtattgtatccatttacatggggaaaaatactttcatcacaagttggcaggcttggttctaatttgaaatatgttcatccaaagttttctgtgtaatatctgaggtaccacaagtcaggccctgtctctaatgatattccccttctttcaaccatagctttaacttatactacaagctgtttggaggatttgtctgcatgacacacacacacacacacacacacacacacacacacacacacacacacacaaaagtcatctggagatctttgggacttactgtgtgggccctggcatcctggcatatctggcacaaaagggagatcccaaggagatgcttgctcatgatacataaaacaggctagtagtggctacagactatgggatttcttatactagatatctagatgaggaagtgtacattagaggaaaagtacccttaacaactacaggcttcccatctcatagggggatgataacgacgggagcgtaaatatgtgactactaaaaattgtgaggatgacagacttctactgaggaagtgtcatgattaatcttatttgtcaacttgacagtatctagagccatctaggagacaaatttctgggaatgtctgtgaaggaaggtctgtgggttaattgatgtgggaagaaccatttggtgtgggtactattcaataaaaaaagggaaagggagctgaacatagcattctctctccctgcttcctgactgtcgatacaatgtgaccaacaatctccgggtcctgttgccatacactccctcttcaaactgtaagccaaaacaagctctttcctcctcatgttgcctttgttcagtattttgtcgcagcactggaaaggtaatgaacaaaataagtaaatactatattcctcaacagtaacctgcttctttcttcttgcatggtgtccatagatatctcaaataatttaagatttattgcaagcagctggccagtgctggctcacacctttaatcccagcacttgggagggcagaggcagaggcagaggcagaggcagagaggcagaggcagaggcagaggcagaggcaggcagatctccgtgagtttgaagccagctttgtctatagagatagttctaggatagctagggctgttacacagagaaactctgtctcgaaaaacaaacaaacaaaaacaaagataaagatttattgcaaacaactgataggagaatacttttatctttcctcctaaagtacaattttacttgtattaaaacttcaattagaaccaggcagtggaggcatatgcctataatcctagcacttgggaggatgtggcagtcagatctctttgagttgagtctagctacaaagcaaatttcaggacagccagagctgttacacaaaaaaatcctatctaaaacaaccaaaacaaacaaaaacttcaattagaattgttctgatggcataatgaaagagtacaaatgagtcaatagagatgggcattactcactgtgtatttaaaattcctaaggcaaccttactcagcatatttaaagaacataggaatcaggaagcttaaattctagtttcatgtttcatatactaaattttactgttttacataaagactctttgagtaaaatcacaactctagcactcaattttttattttcaaaccaacaaaattagactgaatcagaattttgaaaagggtcttttgtctatagacattacttgaaagccggtgacaatgaaggaggcaatggaagtaatttgattagtctccatagttaaacaagttaaactcacattgagtcaagcttggtgacatttatttgagtaggcatatatcatacagtgctctctaaagttatttttaaaagaaaatttccaattagtgattctcaggccacaagttagaaatgtgggccttaagatcattggcttcctcttcctgtgtaaaaaattcaccctaattgtgattactataggtcaggaattccaaaagggttacgattgggaattctagtacagttcaagtttcaatgtcagccatgatggagccatgtaaagccttgcctggaactgccaatgtgttcaaccacatgaccagctactggcaggttccccttacaggaaccttcctaaggatgcctgagagtctcctttcatatagcacttagttttctgcttcttgagaaatcaagatgacagccacaatggtttcaatgaccaattctcagaagtcatttactcacagatccactgtattctactgtccccatggttctgtttaggaagagacagtgcaagggctcagaacccagaggtgaggacctctggaaaccattgtgaatgttgactactacacacagcctccatggacccgtcttgttctaatattgtataattgtaggaaatttacaattactactaatagcattgaaatacatcccattgaaaatgtacctaatcttacagatatgtaaaacacattgccttcacaaacaggatattgactcttcaaggcatccatctcctgatccttggaatccaggattacattacctgataagggaaaagagactttgtagatatgaataatataagacattgaaataaaaagaaaattctggattctctgggttggcccaatatgctagagctaaatttaacaatatttctggctgtggtcaaagtgtctcttttattaaaggaggggagtaataaagacagcaagaggatttgaccctctgtgccactagttgtgaagacggatgaatgggccaaaggaatgtcagtgtgttctagaaattgggagagagaagaattctcccctaaagcttcagaaaagaactcagatttcaaggtgctttgagtttagctagctcaacgctagactcatcctggacttctgacccacaaaactaagaatccataaaatgtgtgtctttggaatctaccagttctcccatggtgacttagttttttaatatttttattatattaaattttgaattatttcattatttaatggaactgtgcattatctaataggacttccaatccatgaatcatgggcattgtattttatttctttatattaatattcaagttttgccttgggatcaaactgacaaaaatcaaaatccctcaagccagaggatatattgtagtgaaattattttgaagaacatgtctcacctcttaaggagactacggtgactttcatttttaataactctttgcaagtggtaaaggtgttggatatttataaagtgtaaggataagctttgagggtgatgaagatggaaagtgttcatataatggtgaatttatataaaacttgattgtatttatttcaaatgatttgctatcagtgttgggcttaatttgcagtagaaaataataccatcttttttctgtataatacgtatgtaataattttgatcattactaatgctttttgttttgcctaatagctatatacaacactgagtagacttcaagaaagttaaagatttaatcactaacctcagagcctgcatatccatataagaatatgaaatgatatattaaagattaaattgcagttgaaatgagcaggaagagaattgaaaatatagcaagtgactactttccacacaagttattcagaaaagtaagttatgtaggtcttcaaatgaaaagaaatcatcacatgagatgagggaaaacaccatatggtagatgttatttaatctgggttttgaaaattacaggaaattagcatagggaatcctgactaactagattaaatgtatgaaaatgtttctattataataaagttcacccaataatttggttattgatttattatttatgaatttcttaaagacaaatgaatgtcttatacatgtgctctgggattaattagaatctatagcaacaagcatgaactcaatatttaatcatatatattgaagctgtatgccatgttttctaccacccaaataattaatattgcatattatgatatagaacagaaatagtttcttctaagaccatgctgtctttagcaaatttgcaatagcaatttatagcaatatgaaaacatgttaaattagcaaactttgggttcaaatgatttctcttacacaccagtagataaagcctgctgcctcctctcatgctgacatttttttgtcaacacgttctgctaattattcaggataacatttttcataattggcaaggccatgccccctgcatggtctttctcagtaaatgttgaaaattgataaatacaatttgtgtgatttatttttgttaaatgaccttattagtgcttctcctgcttgaactgtgtttgtgggtggatgtgggtatgaaaatgcagtcttgactttttcaagaaagaagttatgcaactttacacatcataaatttaacaaccaaaatgttatctgtaataagtgtttcgagaaagcgttatttaccactgactggtttgatggaagttgattagataatgttttttttcatgtgtgtgttgtcattgatattggccccattccagttggctgctaaggtgtctaaacactcaaaaacaaaaattacccgtaaagcttgtgacagcatcctctgggttcatggatacagatcactgcacatctggatgggttgttctgactgagtttataatgtcatatcccttgtaaacacaatacacctgtctctcagtttaacagacaggttttgaagctaaagcatttgtttttcctgagaaatgagtcacaacacattatttacaaatattaaacccaggagtcacaaaaacattttagtatttcatttattgtatctttagacagagtaaccatttgatagaagaaaaaatatctaccttatgttggcattttgggaaatctaaaagtgagataatgaaaacatcaaataattgatgaattcctttgacttttagagcataaaagcaaggatttgtaactattttcattctccacatcttgaaatttacttctgccttccatgttacaaaggatgaaacaacaaattttggtgtgcttccagtaagtacaaggaggttcacaccagacttacaacattacagagtatttctctgacattacactattctggaggagcttgcaacccactgcaaaggatagaatggctacacatgagaagataccacactccccaatgagtagatgtcagttatatgccaggtgcaaagaaggcaggtaaaaactgataggttccaggtttggaaacaagaatgaaggatgccctttgatttgaagttctgatctgctgccttccaaagagctactctgcccctcatttaaaaatcattgactctaaatgagccactttattaggtttccagattcatttcccaccacactaagggctgtatatcagattttcactccccatccccttgttcagatgctgagactcaaatatgagtattattgccaaggtgcacacaggctcaccctcttcattatgcttttgttaacatcagccaagacagttacagggaaagaaactcacaaggattttccagtgatcgaacactgttaacacatttggaggtgggggctgaataacctacagaataaaacccctggaggtcttaggctcataggtgtagtgactgcacttaagtcatttagcaaagcagtgtgaatgatgagcaactcataaagaagaaaacactctctgggattttcttggtgatgacaggacttcaccctcatgattcaacattaatgcatttaaaatgaaccatagatcttctcataattcgcttgtttccattctgtacacctttacaaagcacctgctctctgctgggttctctggtggatgctgggtattacaggcgtaaacaaattggtgtctgtacccaaggaatctacatgttgatgaagaagaaacagggaaacaaactatggggaagtatagctgtgactgattatacaagaccacagatcaaggaaagaaagagagccaagaacacacaataaagaacaaacgtggaatgaatgaaaccagtggtcatcgcattaggtgaactaagttggatactaagtgaactaagaattgagaacattatagtgaaaacagtgaacagaataaattcaagaggaaaggaagaaaatggaaaagtaagaggggcagacaaacttaagtgtgacaataagcatgtatagaaatgtcaccatgaatctattaatatttataactgtataaattaataattatcatgaagggcaaagagaaggcaggaaaagaggccaacacatgtcataagtccacagaggctcaagaaatagtattcccttcccacaaacaagaacctagtgaggaatagccaagataagagcagaggagatctagtgtgtacccaacatttgtatccctcagattcatgctgagctcctgctgcctggagtgatgatatcaggaaggaccttggaatgtagttcagtaccaagtatggcactgcatgaatgcatgttcttattaaagtgttccttaaacttctctatagtctcttgttgtagtgtgatgactaaaacgtcagccatcttcatcccagaagagaatacttccctaaaactcatgacatcatacctcaatctcagacttccagcttttataaacttctgtttataaaccatccagactgtttcacacactgaagacaggggattagaaacactctattttatgaatgcattaatgcccaccccattttcaattctatgagcccatcacttatactaaatctaataattgtttcaatattttgaagtctgtgactcattttgatgatgtcaatctctgaggaatataaaacaacaaattctgtgcctagaatcagcaactatgccctcttagtatctccaagacctaacattgctctaaaagtttttgtgtataagacaattaaggaaatattggctctgtgtctttgaatagaagaactgtaggaatttaaagttatttacttttgactaaattattgatcttgcaaagaaaattctgccaatctattatctctccgtggcctacaatattgagattttgttttagtcaacataaacaattcctgaaatgacaacatgactttaaaataattgtttctaattcactccattattcagatcagttctctagaaaattctttcatccccttcataaaagatagactggaacaccttaactagaagtggggaagtgattgtggtggagcacatatattcacaaatgtgatgtgtatgtgaagacacaaaagagactgagataccttggattgttccagaagagcaactatgtgtgtaaacattggagaggaaacagcaagtgagaaataaaagcacccttgctgtggtgttctgttgttcttccacctactaaacagcatttgcatcagtctgcctactctgggagtgttcaagcgccctgaaccaaacagcaaaacaaatgtgcctatatttgcaagtgtcacctcaccttaagaaaacccctccctggattctctgcactctgcttggctcctgaagccctctgattcccactgctgaagctcctgtttgctctcagaactgtttgatcactcaagggcacaacagaacagcatgtagctcttgcctttttggcaggggcttgaagttcagcagtaggtggtttctcaccagtttggctctagctttaggacaatgagtgacaagatgttagttcacacagcacgacttatgtaacttacaaaagaaaaaagatcaggctggaggtttattcagcaaatcagcaagatttccaaacaagaataaaagtcttttccctgtgtcccaagacaaagagggcttggccaaactactaaagggagacttatcgtgaaaatgagtgaatgtggacaatgcccttttgaggttaatgccactcaaaacagccagactgggtcccctgaagaagatgtcttttgtgaggagagaagttacaaacaaaatattatttaccaaggtgttgattcactgaaacagttctcatatgactataagcaatttaaatcttaaaacatctaccccagtacaccaaatgctacatagaataattgtgttgaaacccaataaaactcatataaatgtttacctcttgcttagaggaatttttagctccacagaaaaatcattgccagaaagccaaacatctcttaacatgagagcccatggttgttctttgaattgtgtttttgaggttctccttgtgctttaatgacaaagattgagggaagttgcatgattgttgctgaaaggttgagatggctcaagaagctatgacaatttattcacattggactcttcctctttcttgcttggagagaggaatcacaatgcagataaaatttccagaattggccaatgtttgtgctttttatttttttctgagtaggaggaagaagaagaaaagggaaagaagaggtggaggaagaagaggaggaggcagccacaacaggatttatgcaagactgcaacgctaatctcaatatttattcctaattatgtttgagtcagtttctttcatctttaaggagttctgccaggcaacttgttatgtttcccctttactcacctgctaccatcacctgcgagcacaactatgaacacatgagattcttctgcctctatctctataaatattaagagcatctatgattatatataaatatataaatattaagagcattatctttgataataaggaagaaatcaagtttataatctcatttcatagaaaaatggccagaagattgaaaatcaactgatctttattcaagaaaacttaaagctagtgtacacgctacatattgcaaagttctaggctttgaattggtttcccttggtttttgagatgggtattcattatatagccctgactcaactggtacttactatatagaccaagcttcaaacttaagacaacccttcagttctgcttcccaagatctgggatcaaaggaagttgccactatgcctagctaagtttctttatttttctataaatgaaaaattctggaaaggtcaactatagtcaccaaagcacagaagtggggctttaattgttgatgtagaccattatgcttacacctaaagaagtgggctacctccaacttgagcatctgagattctggattacgacatctgctttattcatctactccatggagcagttgtaaagttcagctcacaccgtgaacataaaggtgtgttcagaaaggttagatgttaggtacaaatgtaaagtgtgatgattttgtcagaatgatgcaaacgcagcttgcctcattcatctacccctactttcaatctttgtaaagaatgcttttcaaaacttaagtcatgatctgctctagatttgtcacttctctcctgcatccgtcttatgtcacattgctttatcctttcagatatatgaaggatgttccttaaccaactaacagtcactagtgataatttttggacacaaagaaactaaaatacaggtacatgataacagggccaacattgttgcccaaaagtctccattgcaagcccaagaaaattgtaggtaaagacagtgagtgtctgtccttagtctcctgtcttttgctttggccaataatgccttgtagggtgattagcacaggaatcatgaaatgggtatctgaatgcccacaagttcagggaggaccctagctatgagagttaacaataatgatcagatctggccacctgtattatttgtgtttgaaaagtgtccatgttgactgaacaaacactctcgggcaccacacatctgtgctctgcagagtcgctttcatcacactaagcctgttcttcgagagcaacgggcttcatgctgaactcagcatgaagacaacagggcaggacaccaattagtggaggcatttgcaccaacctgacaagaccactgtgcggggaagttcactgaagcctatacaagagtgaaagcatgtccttcggcagtaaataattaaactgaaaggaaaaagtgttatgctttatagacggagatttgatttatgttcaggaaaatttgaagccttcagaaatctgatcagttaccagacccacatgatcttgacaaagctgttaggaactgcactgttgcctggtactatacttcctttgtcatctaaactcagtttttgaccttcagcggggtggacatgaaaacacaggtcaggctgtgagtcagcagagcacggagtagatagaagttgccaggaccccaactctactgcttgaaaacaaacaccaggcatcatgatttgtcatccttgccagttagtacttcagttttgtagcttataagtttcacctaactataatgaataagtattctattttctagagagagttaaagagctaaaaataaaaagaaggtaactagccaagtactgaacgtagttttctgtagcaaataaattttgcatttaatcccagtatagatctaactcccacttggtctatttccattcaagttgatattctggaaaatacaaagaaaagatcacaaggcaaatctcctgtgtgataacattctcagaaactttaaacagctttaagagatttggcctcaaacccaaacattaacatgatcgctcaattttaatgaggtcaagcaagcttctgggcatctggctggtgctcaaggtcctgccctgagtggatagggccaccttgttcttaccaagaatgtaagaggtagtgacaggtgataatgtaatgcagaaagcttttgcccttggtcacttcatctttgaaccccagcagattcccagaggctatggcataggccctagccagatgtaagcagcttcctctttatctagggagctgaaaaagactttttgcaaaggaaagattgtttaaaaaatgtaagtgaacccctagtatgtgtgggtttaccagcctgaggaaggaagggagataaaacatctgtagaaattcttagcaaagagatgaaggtgatgctacaataaatatctacattacacagggtaaacacaaccatctgctcattgcttaactatttactgtgataacattctggctccttctaacctggtgaaatgcacagtacattaccgttatctacagcaccattatctattgtgtgtgcaagcacacactagaactctgtgttcctctccacctgtgaatcagcttttgctttgaaattcagccactaatcaatgtttaccagacactcaagcccctaagaaaaggatcacaagtttgaaagctactttcctgggtaatagtgagagcataaataggataacaggttcttcagtactccaggacaagtcctcttaactccctgcaatgttgaaaacactcgataactacacagccagggcaatggccattagcttcacatcagcaccaagtatgggaggcatggatactctgactgaagaatttgaactaatttaagtttaaatttccccatgaagctaataagatggttgttaaagtgcacagagcagagctggagaaatgactcagcatttaagagtacctcctgagtttgcagtgaatctgaattctgtacccggtacccacctctgctggctcacaactgcctttaccgccagttccgagggcgtctaacacatagggattctacagacaactacattgatgcacatacaaagctcgtgggctgaggctcagtcaaataggctacgagcatgtagccatttttcttctattggcaactttgtttgagtcctttaacttcatctgctgaagaaattaaaaaccagactagaaaatctcaccccttcaaaggggtccacaccaggctggtgaaacccacagaaactgctgacctgaacaaaggagagctgttggtccccagactgatatgtgggaaaacagaatgggactgatccagaccccctgaatgtgggtgtcagtgaggagacattgataatctatgggacctcttgtagtggatcagtacttatccctagcataggaatggactttaggagcccatcccacatggagggatactccctgagtctagacacaaaggggttggcccctatcccaaagaataagacagacactgaagaccccctatggaaggcctcaccctcccttgagagcatgggtatgggataggtagggtgttagttgtggggtcaggggaggatgagcgggaaagggaactgagattgacatgtaaaataattttctttctaattaaaaggaaaaaaaagaaaatctcaccccttacatgagattgtctttaacatacctggtaataaatggactacctgactatccatacaccatggtgtaaaaagtacatcacacaatatactatgcaaccttcatcatttctaaggcaaactagtctaccagcaaatacaatcagttatttaagttaatgaaagtctaaaacctaagaacccttaggtcaatggaagggtaatttaagaatcatctatttttcattgtaaggcagagtatctcaaaagaaataggctaatgacacactaaaaacatatggatcagaatcaaagagcctccttcccacttcaatattaaggatgggatggcttttcaaagggtgactacagagtccctgacacaacatagggcactatcaaacatgccatctggtttaacttactggtgtcatccactgtgttatttctagaattgtgggcttcatttcagttgcatttgtttgactgagtagcctacataaaggtcttgttgtagctcttccagactttcaactcccacatgcataaggattcccttaaaagtatatgttcaggataaaggctcataagagtttagtgatgtataatcagaaaactgtgccaatgtggtgggcaccacaccaaggtacaaaagatgcagtttttaacctaagcatcttatccaaaattcagtccatgaaggataaagaaatggtgatgctttgattatttagaatttgattggtagacaatttctgggggtgggctggtcttagaagcattattgaaccatatggaatattaaattcaacctttaaaacttagagaaaatgacaaaggcatgaagaaaaagcaatttggcatatgggcaagaatttatagtaataagtttgttatatattcattagtaagagacaatgagtttattaactgttgtagaaaataaattgctgcaatgggctatatttgctaagtgcagttttgacaagcagtaattttttttagcagagtggtcctttcagagctggttgttattttctaagttttggttgtgtgtaggtttgttagagagttgcttgtgtgtgtgtgtgttttagacatgatctctcactgaagctgggactcattatatctgctgaactggctagctagtaaacccttagaagctgtctgtctatggcaccttctcaagcagtattgttacaggtacccaccactgtgcctaactttttacatgcatgtaggggatccaaactcaagtcctcatgtttacacagcaaacactttaccactgagccatctctcaaggccctgggttattattttgaagcttttgccattcaccattccccaaaattattactataatacaacattacaggcacaagtttccaggtggtcttgatgtacatttcctgtcatctgtaagcactcgcctatgttctgaagaaccagagagtcttgtccacctctactctagtccacaagcaaaagagaaggtaagagatgtgatgatgtaagaagctcagaaagatcattctggggcttccaagatagctcagtcagtaaagcagtcaattagggcagagttcaatccctaccatgcacatgaaaagacctggcatggtggcaaacgcttataatccctgcccctgagatatggagtcaggtagatcgctggagttcactagcaagcctgtttagtctaatcatgatacactctgtctcaacaaaacaaggtgactagctcctgaagcatgatacttttagagaaagttgacttttgcctccatatgcacacacacatacaaaacaaacagagagggagagagagggggcaggggagagagcacttcaggtagtgtacaaaggtcatgcagatctgagagatggcaggtgacaaagaattaaatataggagatctagaaagagcaaagaaggtcaagacttcagaagccctactggcatgtttcctttccttgatctggctgcagaagtgaaatcaatgcgtgcgtgacacagggcttgtgacagacctctctcttgtggtattttctataagcctccttctaccagcatgacaaagaccacacagaggtctgagctgaaaattagctcatcagcctccagctgatatgactgccaacaccaggtttgcccaagacagctggatattgttttaatgactggtatcaccaagtgactccttggtcagtaccaaggagtcacaccactgaccagctgtgtgatcccaaacaggttaataagactctccaggactcagttacccaaactgtgactgaggactcaggaacactaatgcagcagcctctgagaatgagggacactaagatcagagtctacagaacagaggctgattttgttccaaacactcagcaaacataaatcactgttacgtatttgtagctttcccactgtgttaaaatagtgtaactatattttctataacaagcaaaattactaatgtttaacttaacagatagacatggtggctttagtggctattgaatctaattaaacaagttcctaatagccaactagtatttaagaggcatattaatggtcttattgtctttaacttaaatcttcatttcaaccttttaatatatacttataacttacacttccatccttttaaaataagcacataaagcttctcttaaagcaagtaccagcgtctgttgtttctacttcttccttgtttaatcttcgaaactgggcaaagacactggatccttttaatccttctggttcatgagatgctatgtcatttttttcacctaaccactaatgaagcaaactgggaccacctcctcttttatattgtggcagtctgacagatggcctcctaatggccaacacatactccctttgcttttagacacatagcttcttcctttatattatttttcactcctgttttgccttttcctaccgtaaataactttaatctcattgtttctgattctgtctacttgcaatctcaatattattttgttgttattttcatgttctttattccacccaatgtttgttaatggtgaaactggttcctcagaatgtttgaccaacatgacatgaaggtctgtttctttgtctcctattggtgaaatttattgcatgccacagagaagtaagagagtatcctgctaatgcaagatacatttaccaaccacacagcaaagagtcactgacctctgctcatgtgcttacagggaagggtgaaaaagtcacagaagcccctagaaaagtcagccatcaacatttgtcatcttgtcagctgtgaacaactagcatcatgctagacagccactcccagagcagcaatgcactgtcttatgaagcctctctcatcccttttccctgttgccccaactatagatgatccagaacattcagttggccagaggaatggaaggtttgatgacaagttcatgctcactcagggacccacagtgtcagatagaaggaaacctcaactttaaacacaagttggcaacatgagctactgatagttaaatttctaaatggaggtcgttttcattgacttgaacttaactacctagaagtgatcacagaagccactaagcttccctgtctttgcacctagacatgagaaagaccaatcttagtctgtatttaaaaagacagaaggagacaagagtgaaactattttgtgactttgttttgcagatcttcccaatcaaatgaaatcagctacttcattgaggagaaatggccatgtcagggggaaaaggtagttttcccaggagtaaagatgctattgccagacaaaatcagtgacagtccccaaaactaaggaaattaccctgagttggaaggtgacttgtcacctctggattattactgatcactgcttccttttccttccgtatagagacacatagaaaggcatcaattgcacccttctccatctttgcccaagatgctttgaagagatcaccttaaaatgcctcctcccgtcgtggtgactcttatgaagcattgttatagtcaaaagtgatgacgcagatttttaatcccagcactagggaggcagaggcagagggaacatgagtttgaggccagctttgactatgtaccagaaccttgacaaagaaagaaaggaagggagggaagatgggagggggaggaaatggaaagaaagcatgtatatttgttatgattattctttttaaatagtggttcatgtattaatgaatgaaaatcaaaagaaggaggtaatgtcattccaggaaaagatgtaaaaatttatgccctggaaagttttgaactaatatcaaaacttcataactgtatgtaaatctctacaaaatagactaagtagatacaaccacaacttttaacaaaattaaatatcctcatttattatcatatttatacacaagctttatgagtatctgtcctgctttattttaaatgaaccatcaccttgttgcattttgcttctgtgcctttgggaatcacaccccaaacacagtgtgatataaaaaggagaactgttccaggggcaatggtcctgactatgataaatagcactatgatattgcagatgggctttgccacagctttctgtctttaaaaacatgaaatgatactaatctagtgtaattcacaagttacttatgggactcagcaaggcagcgaacatgaaatgtatgaagatgaagtaatttaaaataacagtgtgttttatggcttcttcaagattttaatgaggaaattccacccagtaagtgaaagtgggaataaattgaagggtaaaagggaggggagaacaagagggagggagaattaaaaggagaagggaatggaaagttcagagacagagggaaggagggagagaaggaaggaggaatagagggaggggaggagggaaagaggggtcagtatagatggggtctgatatttaaacataacaacaaatagcaagttaaagaagaaagcgacaatgtaagtttaaatcccaaagccttcaggcaaaggaatcactaatttcacatgccacggggtcactcactgagtctccacttggagcaagtaacttctaaatttctcttcctttgatctgccaaaggagtggttgaaagtttactgtgaaataacttttattatcaaaatttatcttccagctcctttatgtttttctctactaaaatggtgacttttatttcctccattttaatcccacatcaatatgaagccagaatattcccatcctccccatctgtgttaggagttctgtcttgagcatttggggtgggagtgattttttcatctacaacttgataattcctaacttctgaaacagtaatttgcattttggaagtcccaacagggaaacaaaattgtttctacaactgttttcttaattttatcttccagattttgaaaacaatagggacatattgtagagtatattagaaagtataaagttttaaaaggcagggggaaaaatcccccaactgcacaaaatcaacaatagctaaaacattatgttactttttcatttttccattttttactttggaacggaagtcttgctatgtagcccaggttgttcttgaactcatggtcctcctgcttctctatcacgagaggtgggaatgcaggtgtactagcacacacagttcttcttgctgtttagcaaaagctagcttaccttttcagttaatatcacatcatgggcatttttcttcatccatagttatttgttcaatagtatttgtttgatagtatatttaatttgtcattttgatgtaatgttcaaattcagaatgctttttgttagttcctagagaacattggtttattgctatgtgtttgaatctacttatagtctgtttgcttcttaaacagcaggaacgtttttaaattgaagcaaatgttttcatagacccaatccagtttttctcatttacctgttaattatttgttaccttcatttttttgctttttgtttcattgcaaattgaggaaaaatgtgttgtttttcagaatgaaaaactgtgtttagagatacattgctgatagcacacatgctctttgttatttagagctttcacaacagaaaaggtcctaaagattatttttataagcataaaggaaactggctgttgagtataaatatgaaatttccccatggactgtcctagtgaatgcttggtccacaaccagtgctgtcattttttgagatgtcagaaatattaaaagatagtgtctagttcagaaagtaaacaatgagaggctgggggtgcttttgagggcagtacatgtgccctggttccttcttctccatcagtttcccatccacaggaggagggtaggctctgaaacagtctccttccataatcacactctatcttaccatggacccataattaacaaagccagaaacctgaaaattcggaaactgtgagacaaaattgtcttccttcttattttgcttctgttaggcattttgtcagtaacaaaaaaaacccaatttcaatacttgcaaatctgttttcactctatcatttctctacctaataatgtatatagtgatgccccaacaggggaattagtagtgtcaagacagtacaacactgtgtttccttcattaccaatcattgtctaggaaataatttggtaactgttaaaaggtgaccaactatactacttgctataggtagaaaatgtgggacatttgtcaccaaaaccaagacagtctcaaacaattttccccaggaaattccctttgtgcagtttactcaaccaaaatacttaaacgttacagcaagccaacagccaacatcaaaataaatggagagaaactcaaagtgattccaataaattcaggaacaagacaaggctgtcccatatctccatatctattcaatattgtacttgaagttctagctacagcaataagacaacaaaaggagatcaaagggatacaaattggaaaggaagaagtcaaactttcagtatttgcagatgatatgatagtttccataagtggcccaaaaaattctaccagagaactacagctgataaacaccttcattaatgtggcaggatacaagattaacaacaacaacaacaacaacaacaaaaaacagtgatcctcctgtatatagatgataaagaggttgagaaagaaatcagagaaacaccacccttcacaatagccacaaacaacataaaatatcttgggataactctaaccaaacaagtaaaacctgtatgacaagaactttaagtcttcaaagaaagaaattaaagaagacatcagaaaatgggaaaatctccaatgttcttggataggtaggatcaacatagtaaaaatggcaatcttaccaaaagcaatctacagattcaatgcaatcacaatcaaaatctcagcacaatttcacagacctcaaaagaaaaatactcaactttatatggaaaaacaaaagccctgatagccaaaacaatcctgtataacaaaggaacttccagaggcgtcaccatccctgacttcaagttctattatagagctatagtaatgaaaacagcttggtattgttataaaaacagacaggtgaaccaatggaatcaaatcaaagacccggatgttaatcctcatacatataaacacctgatttttaacaaagaagctaaaattttacaatggaaaaaagaaagcattttcaacaatttgtgctggtgtaactggatactggcatatgaaaggatgaaaatagatccatatctatcccaattaggtccaaatggatcaaagagctcaatataaatccagccacactgaacctcttagaagaaaaagtagagagtatgctttacacaatggcacaggaaaccactttgtgggacaaacaatgaaatcaacaattaataaatggagtcacctgaaactgagaagcttctgtaaagcaaagaatgcagtcaacaagataaaacagcagcctacagaatgggaaaagatattcaccaaccacacatttgacagagggctgatccccaagatatataaagaactcaagaagctagccaccaaaacaacaaataattcaattaaaaatggggtagaaacccacagaaatagctgtcctgaacaaggggttgctcatggaccccagaatgatagctaggaaaccagcataggactgttccagaacccctgaatgaggatgtcagtttggagttctggacaatctatgggacctctggtagtggatcagtatttatccctagtacacgaatggactttgggagcccactccacatagagggatactctctgagcctagacacatgggggaggggctaggccctgctccaaatgatatgactaatgttgtagatcccccatggaaggcctcaccttccctggggagcagaaagggtttgggatagggttcggtggggggcaggggaggagaggagggagaaggaactgggattgacatgtaaaagaagcttgcttctaatttaaaactggtctaattacaattataaaaattaaaaagttatacaaaaaaaaagaaaaaatggggtacagatctaaatagagaattctctacaaaggaatctcaaatggccaaaaggcacttaaggaattggtcaacatccttagtcatcggggaaatgaaagtcaaagcaattctgataaaccatcttacatctatcagattggctaaaatcaaaaccactgatgacagcttattctggaaaggatgtggagaaagggggacactcctccattgctggtgggagtgcaaatttgtacaacctctttggaaatcagtatggtggttctcagaaagttgggaatcaatctacctcaagacccagcaatgccactctttgtcatatacccaaaggatatataaggacatctgttcaactatgttcatagcagcattatctgtaatagccagaacctggaagcaacctagatgcccctcaaccaaagactagataaagaaaatttgatacatttacacaatggagtactactcagcagttaaaaaaaatttaaatcttgagatttgcaggtaaatggatggacctagaagaaaccatcctgagtgaagtaacccagacacagaaagactcactcataagtggatattagacataaagcaaaggataaccagcttacagtccacaaacccagagaagccaggaaacaaagaggaccctaagagagacatacatggatcccccagaaggggaaatagacaagatttcctgagtaatttgggggcatggggagaaggagggagagtggtaggagattggggaggaagaaagggaaggaataggagaaaatgagggatctggaaggttgaattgggaaaaaaacagagaaggagaacaagagataccttgatagagggagccattgtagggttaccaagaaacctggcactagggaaattcctaggaacacacaggatgaccccaattaagaatctaagcattagtggagatggaacctgaatcaaccttcccctataaccagtttgatgactaccttaattgtcataatagaaccttcatccagtagttgatggaagcagatgcagagatccatagctaagcactaggcggaatacctggagtctagtagtagagaggctggagtgataatatgagcaaaggaatcaagaccatgtacagaaacccacaggaacagctgaactgagcaagtgggagctcactgactccagactgacagctggggaacctgcataagaccgaactaggccccctgaataccggtgatagttggtggagaggggtttggacagtttatggggccactggtggtggaaccagtatttatccctagtgcatgaactggccttttggagttcattaccttaggagggataccttgctcagcctatatacagtggggagagccttagtcatgccccaaatgatgtgatagactttgatgattccctatgggttagggttagggttagggttagggttagggttagggttagggtttagggttagggttagggttagggttagtgttagggttagtcttagggttagggttagagttagagttagaattagggttagtcttagggttagggttagagttagagttagaattagggttagggttaggcctcaccttctctgaggagtagatatggggtggggtgggaagagcataggggaagtggggggaagaagggagggagaaggagcagggatcggtatgtaaataagattgttttaaaaacaaaaataaatatttaaaaaagccaactaagtaaataatctcctgtggaagagggtcatatctgtaaccctcaacagaatccactgaatgatcctggtaatcttgaataatgtacattgggcttcttcatcttatctatgatgcttcatgaaccctttttccaaggatctatttatgaactacagcacaccatggcagatgagctgcttcccatgtctctcttctctgcttctcttcaccccttacttcttggtcactattctccagttgctctggcttctttctgatcttcaaacatgtctatttaccattccttctacctctgtactagctgttctgtcaaatgctcatacatccttcttcattccattcatggcacagatcttacccatcagaaatgcctccctggacaaccattttcagaataacatctgatcctaccatttcacagaagtgtccatatctacagttttgctttttgtggtatcaaggttcagaggtcaaaaattctaaatattaggtaagaagttctataataaagccattcataagacttgaattttgtggcattgtatgctgtgataaaaagtcccatgctgtagatgctgtgtctttttcagagtgtgaatcattaatctgtccagggtatccaagctgagtacacaaccttaatgatggatctcttagaaggttgccagttcaactgttatgcagtcatgcttctgctccatggacccttattttacttaataaggacctatcctgatactttgttagtaattatattttattacatgttgttgttagtatcataccatacataaggaacttatacacacacacacacacacacacacacacacacacacacacacaccatgtacatattacctactatttcatcaccacccggaggtcttcgcatatatcctctgcaaataaggaagactgtgattctctttgtcacagttccaatcttagcatatgcttatgtatttgtttaccaccacatctgcttttaccccaataaactacaaggctcagaagcaaggaaaagttgtttaatcactgtttattaagagaatatatgacccaaatgggatagcagtgaacacttgagactgtagagcaaaatgcttctacttaattctgcatgacagaattctgtggtcttgagcaggctacctaggtgggcttctgtgggcataagtttctaggtaatatggatggtagcaattattattgaaggttgctctgggaacaaagaaagacactttagccaggtgaagtgttcactgagttgcaagtactcaatgagtttgcctgtgatgctactgttttactcattaatgaaataattcaaccattgcatcccaaagaggttgcaaacctggagtcatatgaatatgagaataattgagatctcaaaatgacaggtgctatctgctgctgtttaactgttcaaatgttgtattatgtttgagagggcatactctctcaaagggtagaatttccatcccataatcttgattctggttttaagcagaatgttaccgaatgcatctgagaggagtggtaactgagtgttttataaggtctttcaagtttcctgggaatgggtggtgctgggttttactgagaacattggaactgtgaacaacatttgaattgggaattgttcctttaatttctaaggcatttacaaaactggtttccctgactacgatcattttctgggccataaaacacactaaatttggtttactaggaggcatcagtgtaaacctttgtcatgggtttcagtaacagggctttcctacaaacatgccatctaaatttttctgaaattttagagagtggaacagatggtttagcgctctgagactggccataatggcctcacaaagctttttatatcatttgtgaatttttaatctttaaacaatgaatcatagaggtagggaggacacacactgaatgttgcttctaagagttattcagatcatcctacatgcccacatgcagttacatacagatacttattcaaaagcttatgatctattggcctcaagatttgggggtgagaaggaagaagcttgaagatccaaaactgaaatgatgaattctataatttactagaggttgcaatataaaatgaaactaccagccagaagtcaggcatctcccacaactgagtcttcctacatcaattgcatggctctctttgatatgagggcaaggctaaccccaccccgtctaaaaactgctttgtggtccacaggggggaaagggccttgtgacatccgaatggtccgggaacttactaagttaacaaacttcaaactgttttatgaaaaaaagactaataacatctattgaagagaggccactgtactgtttgaagattagtaaaggagtcatgatctttgttcaaggaagtaaaatattaagaaaagttttgttggtagagttctgaactgaatgtgtgctgtgaagatcttctgatcacagaagctgcttcccatccaaaaataaaataaaacactctgatatgcaaatgataagaatatcctttggcatcaaataatatctaaaagcaaactctgcaaaatgtcccagaatttgtttatttaagaacattctgttccaacttcaaggtggactctacaggcaaatatttatacagattatttttaaggacttttgtaagtttctattgtccagctttatttcattgatgtctatcaattagacttgttttataatgatagtgtacccttaccataagaaaatattattattgggtcagaaatgttataatagtaataacaataataaatagaatccaaaatcgtagagccattaagtctctacaaccaactgtgcatgaccaagtagcccctgttaccaatcagtttaacaggagtggcatacctaactgagcaaagagcaacagctcctgcctggccttacagagagaggccattgggaaactttcttcaactattcaaggaggacatcagagttttctattgattttgactacatcctaactaccacttttttcctgatttcttgtgtgttccactacttattctgacctcttacgtgtaaaatcacagactggtatcagctatcacttcccttcataagcagttcccttggctgagcccaaactattctgagggcatagttgtagctgttctctctttagccctgagttcttaaagttgaactctattattgggcaacagcaccatgtggccatggggctagtttcttgtggatgtgccttctttgtatcacacttcctaaacagcatcctctcgctgggattctgagacaagccttaggagactgggccagaaggtggatgattaataaagcttacataaaactactaataatccttcatgatcatggtgacattccgcattgccatctctgtgagagggaagccctaaatcaaaagaattcattgaaaactggcacagttctgtcatggcaaatgagacagaagatggcaatgttaaaacctagactagttggctcctttgagaagacagtagccccaggcagagcccattgtcagccatcatccaccttaaactcttaagaggaggctggcacacattcccctaatgcttgtggtggttaagaggccagactttgaaaacaaaaatgtctaaggcacactaaagggcagaagaatatcttatctttgacacttaaaatgctagaagcatttggagtaggccttggatttcacatagctcactttgaactttgcattaatttcccttacaaacttatatttaaaaaaaaaatctcaaactttctatgatagttaatcttcacgctcaacttaaggggatttacaatcaccatggaaacacttccttacttgtctctctgagagtacttccagaaaagtgtaactgaagagagatgagccaccccaattgtgagccccaggctgagtaaaaaggagaaagaggaggggggaccaggatatgttgatctgttcttcctgactgcaaaggcagcataagcagttgcctcatactgctgccaggtgcctgcccttccaggtggattgtctcccctcagactataagccaaacaaaagctttctatccttcagttgcttttgtcaggtattttagtcatagaaatgagaaaatgaattgatatattttatgatgatcaaatgtgttcaatttcttcaatgataacattgcgtcttcacaaacttggatttttaaaaccactcctcccgcaccatgtttttcttactcttctcagacaccacatactacattttaacagagacacgaaattaaagaacatgctcatcagagctgactgttgttgtgtcatagtccactagtgtaatcctttctgtcaacccattcatttcatttgggtatggtaacagaaggcaggactagtaggaacattggaatttaacaggtgcagagtacaagctgtagggacaatctatctgaaagcatgtggatattgacataaaaacattcatccttgctaaccaggagattaaattttctggaacactggtgataacaattgtacaaggagtaaaaaaaaaatgacgtctcagcttcataacagtacttgcaattttcatttgcaagccattcaccatgacctcaagtccctacaggttaatgtcactaataccatttaccatttctgcagagaatactacggaagtctgaaacacacctcattatttaaactctaaaatctagggatattttgaaacttacaatatacctctagtaataatgaggagagttctcactaataagctgtggcaagtttggacatctccaagacagattttccaaggacttctagtatagttatgacatgaaaccaaccatacattacaagtaaagtccaaggtccatcctatgtgaaacctaaataatatttatcatgctttcccccaaagagtcagaaaacattaagaactaagaggttctgccattaataaagtgcatgactttgggaaagtcacttaatgtctccaagcttcaatatcccactcagaggatttctctactcagggtcatggccatttacagcaaagttttattctagactccatgggaagccagaatataaaactttgtaactttaagcatttttctattataagcatagtttttgaaagaaaatagtcccaaatgttttcagactaattcttcttagcaactttgccacagtcatcaaatttattcaaattaagtagcaaatggagacatcctagagcagatatacgttaagttttaggttggtacctttatattttacatatcattgaattctcaaacaatacaattagcaatagtgcaaaatgtaagtggattgaatctaaatcgtgaagctgcagggatgaagtttttaatcactggatgttttgtaccataactaaatcacgatgtttatgataattttattacttcagccctctttgtagcagagttattatatttccctgtgatgtatggcatcacacttacaaaaccctttcagtaatcagagccccacaaaactggcttctaaggctcattaatgtgaaaaacgatcataaaagttaggtaagtgtagtcatttcattcttggattagaactcccaactatggaaggtatgttctgcttctctgatggtattcttgactagacattaactagtcaaaaaagatagagagattcacaaaggacatgtattcaagactgaactacccagcctagaggaactgtgtttcttattttagtctcttctcagtttgctactggaattccaaactccatgacttatttttgctgaccattttttcttttcctttctttttccttaagatcaggcctccccacacagcgcatgatagccttaaaattcttaattattcccctgaagaagcctccactctgctcatctaagcttcctctttcttctgtctcccaacagttttgaaaatgctcctgaaacagaagttgctgtatgatctctctttaagtactgtataacggtggtacacgtattatccattttacagaagagaaagcctttaattttaccaaaggaccatatatagtaaataatgaagtgagacgaaggagtcaggttattggaagatagcagaccactgtcacccaccaatagctattacctccagggagactgcctaggtgggaaaaatgccaaaggcagctgcagagggagtgagctgaggttaaagaaagtgtaagtgttcaagaatccatgtgccttgattttaattactgaaagaacaaaacaaatgaaagaagcaaggaaggaaggagagaccaaaataaaaaccccagaaattaatatttatcccagtgagactcagaacagtggtatagagaaagtggtccttgggttttcacttcatgttatcactgaaaaagttctagaaaaccattctgttagggatcaaaagggacttatccagaaattaccactgtagtcaggtgctagaccagtgagtacagtcccaaaacctggtcaaactttgagaaacactgaaattccatgtagaaccatagtcaggagtagaagtaacttttttaatacaatttttaatttaaattagaaacatcttgctttacatgtcaatcccaattccctctccatcccctcctcccctgcccccacaaccctgatctcatccactttctgttccccagggagggtgaggccttccatggggaaaacttcaaagtctgtcatatcatttggagactttccccagtatgtctaggctgtgagagtatccctctttgtggaatgggctcccaaagtacattcatattttatattagggacgaatactgatccactaccagaagccccatagattgcctaagcctcctaattgaaacccatcatcagttggggtcatccttgtacatcactggacatttccctaatgccatatttctctttaaacctataatggctccctctattatggtatctcttttcttgctctcctctattcttcctcctactcgatcttccagctccctcatgtccccctttcccctcttcttctccccttctctttctcccaatccctctcccctctcccatgctcccaatttgctcaggagatctcatccctttccccttatccaggggatttatgttcttggttgtcaacttgaaacagtagaaaaaagaaacctcagttgaggaactgccgccattgggttggcctataggcacatatgtagggcatattcttgatttctgcttatatagaaggcccagtcccctgtgggtggtacaattcctaggcagttgggcctgggctgtataagaaaggcagatgagcaagtcagaggaagtaagcaatgagcagcatcccttcactgtctctactttcgttcctgcctccaggtccctgcttgagctcctattctggtttgccctaatgatggactttcctctcccgcttgttttctgtagtggtatgttatcacaataacagaaagtttcctagtacagcagctcaggtgactttatccaaaatatattacattttatagtattaaccactccccctctctctttgagacagggtttatctgtgtagccctggccatcctggatctcactctgtagactggtttcaaattcaaagagatttgcctgcctctgcctcccaagtgcttcgattaaagtcatgtgccaccactacccagcttaagtcatatcttaatgcaagagaattgaaatggcttcttatattttcagattataacaaacaaaattagatgttccttacaagataaattgcataaactatgcttacacatggagatgaatgttgtaaaataataagttggtcaacaaggtttcactcacataggcagtattttaaaaagcaaataaagatgtgaaagtaagaagtgatactattagaaagagaaagggaactcctaagagagggttttaagtgtgggtaattgaggtttgaccatgatcaaaatagtttacacacgtctatgaagaggccatgattaaactctttctttatgcaaatttatacactaaccaaattcttgagcattaaaaggacacagatattcatgtgccaggtcttgtacaatgtccatttcaattattcttgactttcacacaaaactgtaatgttatactgtccaaggagacagatagcaatgaggagagaagagagggagcttatactgcatacagttgagacccactacctacctgcattcagcccatgagaattctatcagggcatttggcaaaacctccagtggtcttcagaaattctatttccctaaagacagatcatttgaataaacaattaaaattctttagttttcagccacatcaattttaaaagtcccagccagaaaggtgttctagactgttttttttttttcctctgttacttttctctgatttcctggctcctcttccctaattaaaatttcccaacactcccacattctcttctctctgggctccacatccaggaaagaaaataaaaacccttccatgcctgggagcatattttaatgtacataattaaaactaaaagtgaaaagaaaaagttcatataacaaagacttacagagtatcatgacttcgaaattcatcaacacagtcatgtgcacatgatcaatctgtgcctttaactcagtccaaagttcctctgcaagagttcattcacttgcatgaataaatcaaatatgtgctccaacagccaatttctatttccttatgtataagagcagtctacaacaagtgtaaagccaactgtgtttgaaacaccaagtgtgtcttttacttaatatggggaaaaatgtgtatggaaaggggttcttgcagattgactcaaacttagtggctaaaacagttacaaaaataaatatgtcagcacaactacagcagaaagaggtaagaatttctctgcagctgtgacaccaaggctatggtacaaagttccaaattggaaagaaggcaaaatgcttattgttgtagtttcatccatttgcctgcaaatttcaagatgtcactattttttatttttattttttaatcactgagtagtattccattgtgtatatgtaccacattttcattatccattcttcagttttagagacatttggttacttctaggttctggctattacaagtaatgctgctacaaacatagttgaacaaatgtccttgtggtatgagtgtatatcctttggatatatgcctaagagtggcattgctgggtcttgaggtagatcgattcccaattttctgagaaacagccctgagtgaggtaacccagacacagaaagacaagcatggtatgtactcactcataagtggatattagacataaagcaaagatcactagcctgcagtctacaaccccagagaaactaggaaacaatgaggcccctaagagagatatacatcccccccaacagaagaggaaacagataagatctcctggaaccttcatccagtaactgatggaagcagaagcagaagcagagatacacagctaagtactgggccaaactcctagagcaacggtgagagaccatattggggaaacccacagaaacagctgacctgagcaagtgggagctcactgaatccaggctgacagtcagggaacctgaataagaccgaactaggtcccctgaatgtgggtgacagttggggagcttgggccatctatggggccactggcagtagaataagtatttatccctagtgcatgaattggctttttggagcccattcctatggagagataccttgctcagcctagatggggggcgggagtccttggccctgccccaagtgaaatgatagactttgatgatcctccatgggaggcctcacagtccctgaggagtgcatgggggtgggatggggagacggtggggaagtggaagggcaggagggaaaaaattttaaaaatgcttattgtttactcaagctatttacttgtacatgcaagccagagagagcactgaagacagggaggtttctggagtgggcatggtggttcttttcctcttctcccccactaagggcaaatgtgtatacacacacatgcacattcacatgggcaggcacacatgacatctccacatcacacatatcagataataaacatacccaccactagcaggtccacatattaacatagtcaaaaactctctggactgtaacaaaggaatggactgagactcgaatacaagtacctgtgtgtggtagaaacataacatctccatcgctttggattcacaagtcttaatcaaaaatgcatcatgatatgttctctcatttactaccaaccctacctgcccttttttagccttccaaaacacccaggccctactaggttatttgacttcaaggcttggaactaaaatttttcaacccagattaataaccccaagagctgatggtgctatcagaaagaggtagagattgcaaataacatttaaaagcactgcttacttctctatctggaagtaactctcagggattactaagtatatgaagtggttttgaactcagagtgacttgactatagaactcaccacagttttttcagccaattaagatcgtctcttttcggtggtacaactagaaaagaaggcatgagacaagagatttgttcagttatgatcgagattacttagaattcacctccgagttaccagggagtacaattccccacttgggcaaagagggacccctcacctagaaggcacatgtactctccctccctccaatcctatattcctgcctttccatgcagaataaaattctatcatttgtagatgatgtcctcttttagtactgaagatgagcaaaatagatttttattttttagggatttaaagcctggtgatagaattatagtctttataccttttgacaatgaccctgatggttcataaacgccaatcgtgaatgaaaactaattacagctctttcaggctaaacagcagccactgaataccactaattatgcaatgaagctcacagtcatactaaaaacattggcaataaatgaattcacagggaagacaaaaaaagaaaaaaggagaagaaaaaatgcagtatatcagccattgtgaagaaaatggcaaatgctaaaatctttccttattacaccatggatattttaaatgctttaattactgtacaatgattgcttccagctcgacacaaaggcagttctcaaggctgacaaatcccccccaaatccccaaatgcatctttcatacatactgatgattgtgagcttaatattggtggagatttgcctaggttcagatggcattcagtcagcgtccacattcaagtcatcagattctaatgtataagaccagaattctccaaatacttgggaccaggacttgtttggatttggtggaagtaactgtgaattaactctgttaacttggccaagattttcttgcagacttccagttaaatcagatgctgtggaaaatcctgaggattcagtgggacccaaacgtcaagtttatcctttatgtgctctgatgccaagagacttagtgctaagaggttatttatcatttaaatataaaactttggtaatcccatgagcatcttcccaactcttctaaggcagatgtgccccagggggaacatgatatgagaagcatgaacccgctatcctcgtgtcctaggttcagttcttctgtgccttgcaccatgtgagcatttcgtgccttccagactatttgaaaggttctacaggataatttctttttcaaaacattgtatgtgcttgtgttgtatgtgcatatgctaatgtgtaagggaagtgaagattgcgattatcagtggtgctcttgggtttggaggtcagtggtcatcacagtgtcttcctcttttgctaaagaccttattttatttttagaacagtcacttactaaaccttgatctcatagatcaggctaagatggctagccaataaacctcataggcccatcattctttacttccccaatactgaaatggacatgttcttcctttcccagtattttgatgtgagttgtggagatcaaattaaagccaacatgtttacaaaagacaactccaggttcaggaagataccctacctcaaaagaataatacagagtaaaggggacttactgatgcccttgtccagactctgcacacaaacatacacacacacacacacacacacacacacacacacacacacaccactctacttaaaacatagctcttcccctaaacctgttactgctgtgggcatgattatttttaatataacactatcatttctttgaatgctctatttctatctgcatatcttcttatctccccaaaaggtgaatttaaagataacaagagtcattaaatcaacagaaaaaatccaaagttcagctcaaatggaatgtttgctccctatcaattatttttcaatagcattttataagtaatggtatataataatcatgcaaatcatggagttaaattacagcatgtccattcaagtataagatgcagttggcttgcatccacccccctccattactctttcatctcttccctgccttttctgctttcttttcctttttctcttccacatggctggtaaagcctgccctccttagtttcctatgaattttaagttctcacatgtgtatcttgaatattatttgatgcccattggcagatctgcaccaccttaccactcaaagtgtccttgattcatcaccttcaaagaatcctgaaatttgcacacatgataaaaaaactcctatccacaggatggactgtaaaaagaaggaaaggggcaaaattacttcaaggtctgaggagtggctggtcagtgggaggaagagacaggcaccagaaccatcagggactggctcagaggggattttgaccctgggtttctgggacctggatgtgggtgaagtttgctaaaagtcaagggaattcaaggaaagtgacttcaaagtagatggagtctttcaaagcagtactgtacgtagagaaaagaaacaagctccagcttgtaccagaatcatttggaagaacattctggactcctgccttctgaggacaagagtcacagggatctgagcagcctccaaggcctcagggaaccttctacacagatcatcatgctagctatgcattcctgtacatgcctgcgaaccaaataactacaccctactcattctaaaccaatcataaccctgactcagcttctcctgagctaaattcaaaactaccctcccacctctcgtgcctctcaaatgccttgcaaaaggaagaaaagtttcatgatggaggtagaatgaaaagtcaatgggttcttaaccaactgctggcaagcagacttactgttccaaaatgtttccaaataaatcatcatacaggccatcccccatgcctgctgtgggttcctctatgcagctgatgtaagtgcaaagcactggagtccgaaggtcctcagctctgcaatacagcctcctgctaaagacccccagacttcagagagctgccactgtgcttctgagatctttgtgtgcctgactcctctcctgatgcacaatataacatccaactcagtgatggacatttccaattgagtcctctctccttctgatttcattatcctaaactagaggaattagccatcagatgagtgttgagagtggccacacctaactcttattacagaagtataaaggctaactagccttcagcctcctgcttctgtctctaatcttctccagagagtgatgtgactacagatgcctgtgtagtgcttctagcttttgggtgaattctgtttcaactcaggtcctcatgcttgcatggcaagcacttttacacatggagccatttccacaaccatgggtagtagtcctacacaccaaaaccaaatatgatccctatgttaattattctttgtgtttgtttgtttttcaagacatatttctatgtgtagccctggctgtcctggaactcactctgtagaccaggtggactttgaactcaccgagatccatctgcctctgcctccagagtgctgggattaaaggtgtgtgccgccaccaccacaagtttatgttaagcatttttagagaaccaagaatcattcttaataaggtttttcattattaattacacatttatgtgtaattaagatattatgtgtctgagatgtacttagtgtttatatacctcaaaattcactttgacagctaatccaccaccagacaaaggcatgatgaagtaaagcctttgtgatgtgagtaagtcatagggcagaaacattataaaagagtcaccaggcacatttctggctccttttgcgatgtgagattataggaagaaaatgaccatgaagaagctagccctcaccaaacacctaatcttccaccatcttgatcttgaaattaccaatatccaaaatggcaataaaataatttctgctatctgtcattccatctacgatattttcttataactgccactatgaactgagacaatgtacaaatctcaagttaaatggaaagcaatggggctggagagatagttcaaaggttaagagaacatacatctcttgctgagaatagtggtccagtttccatcacccaaatttgggaagctcacagccacctataaatccagctccagatgacccaataccctcctctgatctccacacacacacacacacacacacacacacacacacacacacaccacatacatgaaaatacttttcaagtagtaaaatatttcagtgtttaaagaatttcatgataacctgtaacaatatgtaatttttctactccttgtattcaaatcttgggttagtcattgatgttttccttactttctgtttaaacattcagtctgacccttcttcctcatagtttttctcccatgttcactatatatttaccctgtcataatgccgaaggaagcactggctttcaatgatgaatttccataattgctgttccttgggcttgacgctcttcctttcacagttcatgccacataggattaaacaatgagaagaagaaggaacttgaagttcctgagtgcattacaaaccagctccttaacctaatcatctcagttcattaaaatctgcaatcagtgtgcccgtttcatttctcaaatgcttcaatataaaacaccagcatttgctggaggagtctaatcactgcctaattagcataacttaacgactcccagctcctctttctcaattgactctcttgcttcctagaatgtcctcatgctgttctgacagtaaaagctgcagctcatctgcaagtgaagcctcacttggcccaagccatttgtaactttcaaatgacagaaaaattgtaaaggaaaattatgctgattttaatgtcccacatcaagatgatatagataggaccaggtgatatttgttgctttgcaaggcactgggacaccatccctgcatctactggcactcctaataatctccccggttcgttctatttttttctatttttatttatttctattttatttattttatttctattttttctaagtttcctctgcaaattggagcatccttactaatttttaacctacttttcaaatctgccctataactcttaacctaaaatttttctgtctttccctgaaattcctactagaacattcttttatcatagacctctttgactcttctgctaccccgagtcaccataatttgctgtgagaatgaaaagtgaggccatgaatactcatcactgcatgaatcatttttttcttcacctttaaatgttctgcatcaaggctgggagattgctcaggcttcaagactgctttgtgctgatcctgaagaagatgactttggttccaagcacttatacaaggttcaagtggctcataactgcctgtaactccaattccaggggggtcttatcccctcttctggcctcttctagtacctgtgcacaaatggtctatataaactcacacaggcatacacacatacacataaataaaaaataaatctaaaagatgctctacatccatagaggaattttgtttgtttgttttgttttttcaagacagggtttctctgtgtagccctagctatcttggaactcattctgtggaccaggctggcctcaaactcagagacatgcctgtctttgtctcctgagtgctgggattaaaggtatgtgccatctacaaaggaattttgagaactgtcttctctgtaagaatttctctgataatccaggcatagtggtgcattcatttaattctttaattagaggaagaggcaggaggatctctgtgagtttgaggccagcctggtctacacaatgagttccaggacaaccagaactacatagtgaaactctgtcctgaaagaagcaagcacaattccctaagcctcgcactggctttactaatgaaagtgttcggataaactatagtattcttataaaaggtgcaaagtagtctcacagctagaggaattatcacaaagcaaataagtccttgaatgcagcagtttggtccagatagacaactcgtaagtgtacaattaattcaaagcttccatatgcccttgtaggtacaatgaggttcatgctctgtgtacttcctgcagacagaatctgtcagcaggtacctctgctgtcttttgcacagcattgtttgtgagagtccattttttttttttacttgtagggtttgcttatgctcactcctgaaccatcagtgataaagagattgcaaatgcatgtcctctgtactgttgaggagcacaggagttcctccctgagtttggcatctgtaaatagggctgcaatgaatattcctgtccatgcctaagtgtataatttcaaaggagtacgatggtggaattgttgatccagagaagaaacacatgttcagattttgtagagtttgagaatgcttttctgaagtaattctactgatgcagctcttacagttttaaattagaggcctaaacatgcacatctctctaatactcagtaataccagtcttttcatcttacccatccaggtaagagtcataacctgattttgtgaatatttagcaaagcattttttaaaatacacaggatactttaaaggtaatggttacacatattcaaactgaatagattgtagttttattatacatatacatgtaacatacatacatacatacatacatacatacatacatacataacaacaatttaataaaaagaagtcaagaattgaaagagatcagggggagatggtacatgggagagtattgagggagaaaaaaagaaaggagaaatgatgcaattatattatataaaaaattaaaaataattaaaattgaaggttaccaacagttaagactttgctttaagatgaatgtattctatgaggaaaactaaagattttactatataatatcatgttctatagaagataaatgaatacatgaatgatagattatacatgatagaaagataagtagatagacacatatatacatatatagaagatagatataaatagatgataaataaatggatgatacatagaggtagttatagatataaagagatggaatatatatatatatatatataatagatatatagatagatgatagatagatagatgattgacaaatacatagactgtagatagacagacagacagacagacagacagacagaccgatagatagatactggtggaaacacagtcattatagtcattaaaagaacagataattttaacagtcaaaaatgtggcttgcaatacaaataatctgatttaactcttagaactcccactgacaaattgagtgatcttggtatataagtttgcctttgtttccccatgtgtaaaattgtaataacaacattattgtaccccatagtttcttggtgaaaaaataacctaatatacataaaacagtaattcagtaaacaatgcaataaacagtagacaaatatcagatgttcttgctattatacctaagcctgtgtgagatcatttacatatatccacaggttaccaagctattacctaaacttgtaagaatcaggtgtcgttaccctctttcttcttccttgtcccattacttgtctaagaaaaacatcctatgttaaaaaaaaatgaggacaagatagtaacatctaaagctgggtgttggtggtacacaactttaatcccagcactcgggaggcagaggcagttggatctctgtgagttcaatgccagcatggtctacagagcaagttccaggacaggctccaaagcattacagagaaactctgtattgaaaaaaacccaaaaaaaatgatagtaacatctaaaatatgcaaagaactctaaaactatgtagtaagaagtcaacccaatcaataaatgagcaattagataaatggacagttcttgtccaggtaactcatgaaaagcatcttcagcacctccagccatccaagaaattaaaatgacattgcaatttcatcttactttaatcagaatggcaatcattcggaaaacaaagaaaagcatgttagtgactatgtgaagagaagggaatggttacacactgcagctggcaacataaatcagcccagtcacgagggttcttagaaaaactgaaagcagatctatttacaacacagttgtacctctcccaagtatttaccttaaagattccaaatcaacctaccagaaagacatctatgtttactgcatagtaactaagttaaggaaacagtctagatccccaaacagaggaatggataaagaaaatgtgctatgtatgcacaatgaaatttttcagtcatgatgaaaaatcaacctgtttgtgggaaggtggatgtaataagattatcatattcagtgcattcaatcatatttagaagagcaaatatcacacattttatctcatttgtagttcctagatttcttataactacatgacatggaagtagagctgaagatgtccataggaaaggaaaggtgagagaaagtgcatagaaaggcaaggaagagaatatagtccaagtacattataaaatccaccatcgtatgcagtgagtatactccagcgtttactaacactaacaaaattgtgcttataggtaagcacaattgttccaatattccattagatttgttaggttcgtaacaatgttataaaaaacataaacacattagagtcaattttcccaaactcctgaacttcaaataaagaaaatgagatttggatacattaaaatgcctggtgtgagattatgtagataattagcaatgcatataaagtccagggaccccccagcaaggagttcagttatatgtgcaataatcttcttcgtccatagcatgaattagagggccccaaaagtcaaggtccctaggtcagagtcagaagaatgagtctcaaaactttttagaaagggaagagataatattcattaaaatgtaaataaatttaattaccaaactgcaatcttacatatctcaagatgtcagataaattatttattatttttgtgtacattaaagtgagttatggggctgaagagatgacttaatggttaagaaaacttgctgctcttacagaggacccaggtttggctcccaaaacccacatctatcaagtgactcacaactacctatactctagtgctaggggacccagtgtcctcttctggcctctgagggttccttaattcacacggtacacatgcagaggaacaggcacacacatacatagacataaattgaaaacttaaagtcacaaaagtaagtttataacatcttatccaattagtaagatgttgttttgatcacatagcttactacaaaaacactttcagaaatgcaagctccatattttctaaagaataaacacaattctgtaaaatactactacaatcttctatactttttttactatactttatatttactcttagtgggacctccagtgaaacctcttagtaggacttcaagtgtaacagactaaaagtaaagatcattgatttttattccttcaatgatgatagaagattcttgtattttgaattgcctttctagaatgcatctgttttatagaatgaaaataaattgacaaatatgaaagttaaatacagcaaaggaatctgcatagttagaattcttttggtatcagctagactgtgaaccaattaataagaacaggttttgttggacaactttgtctatattgaagtatgagccataattaagtacagcagcaccacccttagcaacacagatctttgtattgagatgtagaaatttcagggtttgttcccagtatgtatatacaagtaagatactctccatttttttctcctgagctctcactctcttgttcaatccacccaaccatgaaacttattgcaagcgagcagcctcttcccatcccagccagaagtaaggattgtggtttctcagaaacacgcatgagacaagagacagggtgcagtacaggagaagcatttgactagctgaacaataaagttgccacaccacttatctagtcttattttcctttagcatgttttcaactttttttaatttgaattagagacaggattggtttacatgacaatcccagttcccttctcccacctgccctaccaccaaccccccaactaaaatcctatctatcacatatcctttctgctcccctggatggtgatgccttccatagggtgtcatcagagtctattttatcctttgggatagggcctaggcccacccctgtgtgtcttggctcagggagtatttctctatgtggaatgggctcccaaaatccacaactgtgctaggggtaagtactgaacttccaacaggaggtcctgtagatttctgaggtttcctcactgaaacccatgttcctggggtctggatcagtcccattctggtatcccagctatcagtctgggcagcaagagttccccgatgttctggtcagctgtttctgtgggtttcaccagcctggtctggacccctgagctcttcactcacccttctctgaatctgggttccagttaagttcagtgattatttgtgagtgtctgcttttacttccaccagttgctggatgaaggctataggatggcatataagttagtcatcaatctcattatcaggggagggcatttaaggtagcctctcctctgttgcttcgattgttagctggtgtcatctttgtagagctccagacatttccctagtgcctgatttctctgtataccaaaaatgcctccctctattatgatatttccattcttgttatcatctattcttcccctgactcaacctttctgctccctcatgtcctctgcatccctcctcatctccacttctcattctcctagatccctccccccctcttcctgagcaaatttgctcccaatttgctcagcagatcttgaccctttccccttctttaggggaccatgtatgtctcccttagggtactccttgtttattagcttctttggcagtgtggattgtaggctgataatcctttactctatgtctaaaatctgcatatgagtgagtatatatcatgtttgtctttttgtgattgagttactttgctcagaatggttccttctagttcgatccattttcctgcaaatttcaagattccattgtttttttccgatgagtagtactccnnnnnnnnnnnnnnnnnnnnnnnnnnnnnnnnnnnnnnnnnnnnnnnnnnnnnnnnnnnnnnnnnnnnnnnnnnnnnnnnnnnnnnnnnnnnnnnnnnnnnnnnnnnnnnnnnnnnnnnnnnnnnnnnnnnnnnnnnnnnnnnnnnnnnnnnnnnnnnnnnnnnnnnattgctggatcttgtggtagactgattcccattttcttgaggagtcgccatactaatttccaaagtgtctgtactagttggcactcccaccagcagtggagaagtgttcccctttcccacatgctggcataactggttgcagactgtagaagactgaagttagacccaagcctatcgccttgcacaaaacttaagtcaaaatggatcaaagacctcaacataaatccagctacactgaacctattagaagacaaagtgggaaatacccttgaattaattagtacaggagaccacttcctgaacattacaccagtagcacagacactgaggtcaacaattgataaatgggacctcctgaaactgagaagcttctgtaaggcaaaggacacagtcagcaagacaaaacagcagcccacagactgggaaatgatattcaccaaccccacatctgatagaaggatgatctccaaaatatacaaagaactcaagaagctagtctccaaaacaccaaacaatccaatgaaaaatgtacagaactaaatagacaattctcaatagaggaatctaaaatggctgaaagacacataagaaagtgttcaacatccttagccatcagggaaatgcaaatcaaaacaactctgagataccatcttactcctgtcagaattgccaaaatcaaaaacaccaatgacagttcctttaacatttttattacaccacttttcacacctctttaaaagctaatggaattatatatacctgagctcttactaactaaattctgagttgcttttacatattctgagaattgctgtatcatataactatccacttatgcacccattaattgattttattttgtgtgggggtgaacacatggacatgggggtgtgtatgttcagatgtcagaggacagtatcctgtgttgttctttgagaactgttcaccttattttctgagacagggtctcccactggtctggaaattgcccccaggctaggctggctggtcatcaagtacctatacatatgtgtgtacctgtgtgaaggccagaagttgacactgggcatcttcctcaattgctctccacattatttttttgagacaagagactttcttgttgaacctagagcccactgacttagcaaggcaactgtctagtgagccccagcaattctctggcctctgcttacccagtgctgggattataggcacatcctcctctcatctagccttttatgtgggttctgggcattcaaactcagatcttgagggtggcacagcaagcactttaccaaatgagtcatctcccaagcccctggttctccagttacaaatgcatggtctgtacctcgtgagaaatctttggaaatgcacataactgtacagcccaaaccacaatctatcatcccagcatgcctactcctgctgcttctcagtgtctaaccattatccacaaaggcagccaccattccaacattttcatcacaaattaattagccaagcacagaatttcatgagtggatcctgttactcagcatgctgccttatatatgaggcgcattcctgtgcatcgctgaaaagtattccactggagttttgtaattctgtttgctgatcatttattttttattatatttaatttttataatttcaagtccttttagcatagaagttcttttccattttattaaacatgcattcttttgtcatacaatatatactgattacggtttctcccccccccccccccccccctcccttcttccgcttcccccccccccccccgctccctctactcctcccagttcatccccacctcctctctcatctcgattcactccctttctgtttctcattagaaaagaacaggtttcaaagagatagtaacataaaacaaaaaaccatcatatccaaattggacaagacaagtcagcagaaagagccccaagggaaggcacaaaaatcattcacttttaggagtcccataaaagtactatactgcaggctatagtatatacacagggggcctagtatagacccatgtaggccctgctgcttcagtctctgagttcatatggtcttgctaagttgttttaaaaggccttgttcttctggtgtcctccattcctgtctgcctcctcttccatggacttccctgagctctgaggggaaggatttgatggagacatattgtttagaactgtgtgttccaaggtgtctctctgtgtgtagtgtctgagtaaggcactgacctgtgagtacaacagattatcattaggagtcattttattgttactcttttaaagaacaatagcacttggttttatactaggtctctggtctatctaggttctgggtcttcattgacaaagcattgtcaggtatgggttccatcacatggagtgggccttaagtcaaatcagacaccagttggtgtcccacaaggtttgtcctagcttattggtatttacatttctcttttggtatccttcaagagtacctttgccatagatgtagaacatggggaaggttctatgtaggtaccagcttgacctttctgtggttaatgagttgtgtgtatgctgtttttagcaatgggaccgaccttactgtcagtttgatcattttgatgacaacctgggttgcttgaggatttccatgggacccttttggccaataactcaattggatgaaattcagtccctgtactggaagtttcatttgatgaagagagacagccagtagggcctaatctcccttatttgtagacttcattaggatcaccttcatatattataggaagtttccattgcactaggtttccataccacccctcaaatacccttcagttctaactgcctttccctcattccctccctcaattctatttcctctaccccttcccacctgatcctcctgttcctatctccacctggccccagcccacccataaaatctattctattttccattcccagggagatccatgtgtcctacctagtcatttcctgcctctttgggtctgtggactgtagatggttatcatttatttaacagctaatatccagatatgagcaaatacatgccatatttatgtttctaggtttgggtaacctcactcaggaagatttgttttatacttctatccatttgcctgcaaatctcatgatgtcatttttagcagccgagtaatactctgttgtgtaaatgtactaattctctttatccattcttcagttggttgacatctaggttgtttccaggttctagctactatgaatagagaagcaatgagtgagtgaaaacagcactaagctagccctttcacattctcatgttagtcttttgaggacggcaaagatttaatttcttatgaatatatgtttgttaactttcctttatgaaaaagaaatctagacagtcccagaaaactttccaagggctgagaccattttgtactgttacctacaaatgtggtttgtctagatggcccatgtctttaccacttcggtgttaacatgttctttttttttttaatttaaactagataatagcttcttttaaaaacactgtatcacatttcctagaaagcatcaagaggcagctaagctgaagtaaattttaggtaaagtaggtaaattaagatagtgatgtaagcacacgccatggtttggtaagcagtaaaatggctgctcctgggtcacctagacatgaactactgaaataatgaaaagccacattataggttctctcctacatgcagtttcttaaagattgatttctcctgattctctatatctaccatgttgttgaattgatttcagaaactattccatgttgcagacactaagtttcatgactggaagcagtctgtgtaatcttatctccagtgcctggcatggtgcctgggggccaggaagcaatggataagcgcattatctttacatatgattatctgtcaggtcatgtccaccatttcttccctagacctttcttttgggggaaaaatggtgaatgttcatcgggttgctttgaagcataataaatacatgtcaagtattttacaggattttaaataaatagcacatgtcaccaagaatacttaatgacttttcctacatacaagcatcattgtaagacttgttttaacttctgtgtcttctctccctttttttacttacagaatctgatgcaatcttgtggcttcagttcttgccccggtctggaatatcctatgagttctatattccccaaggattactacacattcacatttaatcataaaactcaccatgtcttcaaatttggtatgtctgaaatcaaatgctcctatttcattcctactggaacttccacatacccaagcagtttgtgtaacatatttctgttttactttccttcactcttctgttccaaatccagtcttctcattctgatcactacttacctaaaggaagtgtcctcgggatagcattccaatgagatgctttggctcttactctctccctatgtttatttcatacatttgtcctaatctcactaaagcattttcccagaccttcagaatcttcccatgacttttcattgcttgttgtaaattcagaacagctaatctaatattgaaaataccctaccaagagtcctgctcaaggcgtgcaatctcatttctgtgacctttttatatttactcacttgtggaaagcttcagcagctattgccaacagatgacctatgactttggaactgcttacaccagcccttaggtaggagtgcatcatttttcatttgaagtccaaattctgtctcatctaagttcaagataaaagccacaaatcatccattaactgaccaacgtcatttttcacttacctgagcattgctgtgtttatatgcaaatcatcacacttctcagttcatacattgtatactagattttatgcaatttattaagtggtgagtttagccagtgcagtgaacctgtatgtttcagaattagacagaagttctggtttagctcaactatttacaaataattaatcttaaggaaaggcgttaaccccaggcaaattatctgcaaaagctgggataaaactaatcacatttattattttaaagattaattatgcataaaagttctctactacacagctgacaggtatttttcagcctttatatgtgcctgcaaattttgcatgctaatctcatttagcgctcatcagaatttttcaaaatagatttaatgccatttagcatctgaagaagcagaggctcaagtcaatctgcagtttttgagcgaccacagacctgtcactcatgtttacattcctagttgctccatgacatgtacatagagttgcctaatgaactaaagcactccaaattactgaatttgaagcaaatctagattaagaaagtatctacatgagcaagtcaatcttaattaatgttttatgttatattttgtgatgggaataaaagccacagatgcatactaaaagtgattgcaaatatggacatggtcttgaataagtgagaaaggaaatgaaaaaatggtatccttcttggacaaagaaaaatcaatatatcttaggtaaaataatcccaaactaccagaaggcagtaatgacacaaaagacctggagaaaagagcagatgacagatgatctatgggcttgcactatgatacagaaataggaggatgaaagcaaaaactaatgtaattttgctgtaagctcaaagggatcatgatcctgggccaaattttacctccaaagcactggtcagttctggatatcatcgtgtgtaatagatataaaacactggaggcagttccaaggaatgcaataaaagtgagtccaagaatagttggatgtgggctgaatctgtacattgcctctgtgtgcaaatggactgtaaaattcagtctcaaccatttatttccattaacacagcagcagagaacagatcggcttgaagaatcaaaccattttgcaaacgtccacatttgtgcacacagacttactacagttctgaaaaaatcagtgtatcgtttcttttcagagtttaaaagctaaagatatgagccattttccagttttgtctagatatgagacaagaagaccagtataagttttagttctaatgaaaaatttacctgctctgaggtgtatcaaaaattgatacaagaagatggaggtatgttcctaaagaagtagtgtggtaatgtagtattttcagagacagaattctctggccatttgcctgcatttgtctacctctgatatgcatatagctttgtggcccttggacaaattattcactagattccagcataggcaaacaggattaataaacacacttatcacccagggatggcaataatcactgaacaaactaatagaatgaacttgaggatatcgaggacaaaattagtatttatcctagatagtattttcaaaataggcttaaaatcaaatggtaaagatgttgactattagaggaatacatgtaaactttatatgtaaaatgtatactcattctgggttcactttggagttgcacggttacttgatatgtgatctatgagataacccctgacacagtttgactatgaaatgttcctccagagcctcaagtatacacaaagtggtccccaaccattggatcatgggaactgtgacttgatgaatgaaataatcctttgatggacttgccatggtgaaaaatgggaagtgagatatagtcagaggagggaagtgggtggggtccaccctgaaaagatgtaccttgttctagctccctccttttctatcctgcttcctagaaaactgcactctgtcataccttcatggcatgctattctgtagtaccatggcccagaagcaacagaagcatccatagactgaaagctctgagtttgtgagccaaaaattctctatcctcaactaagactatttccatctagtgtttttcacatgtatgggaagtctgactaatatgcttttgctttctataccttatgtgacaatatttctcttcttctgtcagacaatttttgataatcaagttaataggcaagaaaatatgtttattttactgttgttgtcacagacacacaccagaacccccagtgcttcacatatattcagttaatgttaatattatattaatttaatttaaaaagacattttcaagtaatcattcaaggtaattagtagtaacatagaggaaaggacaatccacacatctaacacaaagcagttctgtggttctgatttattggctggttttgttttgattttccagataatagcctccaattttcacttttgcacagatgtaattaagtacttgtatatagatcaaagcaaagggatttgtctcattaagaaaagaaacacattatgtaaagttattaaatgtaaattatacccagtgcattatatatcatgctatcagccatcaagtttcagttatttaaaaagtgggaccaatagattccacccaaatgcaaattcacctcattctccaatggacccagtttttttcctatggtattaagcataggaggtcattaattaccaatagcaaaaacagcattgaaagcattggttgagtgcaagcaatgtgtcagacaaacatggtacacttctcacagttacatgacatttttatattaactcgtgtatttaacctttgaaacaagtccgtaaagtaaaatgaatgtcattatttccattctaaacttgaagaatctccacagacaatgctgctcttagtactcaatctgaaacagccttctcattaaagtcaagaatgagagaagaatgtctcctttgttcattcttgtgtagcaatcttctgaaatctccagctaatgaaggatacatgctacaaaggggaaggcaaaaattattgtatttgcatagagtgtttattgttcaatatagaaaattcaataaaattatctttaaaaccaaatgaggaaaaaaaaaaaccaggcagtgtggctgttagatttgagtcaggcttccaaaaattaagccatcttagcaaacagccacttctgtgtaaagtgaagtgacaaaggcacatggcaattctccaaaaatcatcaggaagagccctctcctggccatctatcttgccatgtgtagagaatatcttcatggcccagtggggcttctgcacctagcaatcttatgaatacctgtgcagaagggctatgacatttcaagtcattggttacaatatatatctccacagtgaatagttaaaaaaaaaaaagctgaaaaatatctctgctcaggaagaggatgaccataggtaaaactcaagaaatcttttgaggatgagaagatgccccctacagtttttctagttttatttctgttgtgataaaaaaaaaaataccctgatggcaaggaactcaagcaagaaaggatttaatttggttcacagtttcaagttatagctcatcactatggagagagtcacagtagaagccagactctggtcccattgtatccacagtcaagagcggagatgaatggatccatacatgcttaatactctgctttctcatctcctatgcaaaccagggcccaaatcctggaaatggtacttcccattttcagtctgagtcttcccacatcaattaggacaacaaagacaactccctccccacagacacagacatgcccactcgacaaactgatctagacagtccttcacggagactcccttcccaggtgagtgtagatcttgttaagctgacaaaactaccatcacaagagtgcagaatggcacctcttctcccaactagagtggatgctgcccctgaatttgctaattcccccttcccatgtaaacatgggaaatttgcctccctttcctactttctcccatgtgaaattctacttaaatctatactttctgatttatatcctaattaattgatgtctccctttctacatcatttgctgttttttttttaaaattacactcagcctctaatttaccacatccccaggtatttactcttcctagatagcttcaactactccgtgcattttatacttttttgtgctaactgactactctgaaaacttgtcttcacttgaaactctttcccttaaatcaacgtgcttacatataacttcttaatttatatttttacttagatgttgtcctatttcatttctgttactatggttaaaaaaatctgacaaaaatcaatttataggaaaagtggtttacttcagcttaggttacaatccatcactgtgggaaattcaaggcagaaacttcagatgcacagtcagcagcagagggaatgagaacacacatgttcacttgtttgaatgtgttcagctcaatatctctactcttctacagttcaaggcctcctgtctaggaaacagtgctgcccacagtgggctggctcttcttcccacatccacagactgcccacaggccaacccacagtaaacactcctgactgagactcttctcaggagattttgagctgtgtcatgttgatagtaaaaagttaacaatctagggtatcccagagtagcttcagaggcaataaatctcaaacataggccttaatttgcaattccatgaaaataaactatacaaaatgtatggggtcaacaaaattagtacctagaaggatatctgaagcctaattaagacatttataaagcatagacaagtgaaaacttaataacttaaatatctaaatttaaaaaaagagatgagcattgaaaaactattaatctgtgtagataatctaaaacaattagaaaaatagggcttggcatgtagttcaagagtagagcagttttctatcatgcataaagcctttagtccgatacctagtaccataaaaaatattaggaaaaagaagaccatgaaattaaaaggaaggatatttaaaataagggtataattgattgataatttttgattctgaaagtaaagtagagaaggatcccaaagggggcaaaatctacagcctcctgactagagtaaccaaggatacaggtgtcagaaagaattggaaaaataaaatgaatctgaagaaatggcaggtccaagtcccaaggtagtcaagggccaacccaaggctatgtatgcaataaagcttaaagttgaaatcagggttttatttatttttctaagctcccctgtaacacatcttcagaaaatcacctccatcactgtgctggatggaggagagagaaaaccagtgagcactcagtgtttctcattctccatgtgtgttttacccatctctagataatgatgaaatcacacaacacaaagatactttgcttttggaaatcaatgctttcagggttagacttggaaactgaaagaaaagagaatcctgaatatcaacatcatcctatatcccttgaccatcatctgtgccacatcactgtgacagcagcaagtatgctgcagacagtcactcaggaatccacctgtgtcccctagcacagatccttcaagtccttgaatctgttatatcttcccataatcagtggtagacgtttacacatcaggagatgcccttctacactgatagtgatgttgctagacactcttgagctcattgaggtatgcaaactaccacactgcagtcaactctgccgctgattcattttgccaggagcaagaactgagactctcaagcatctaatgagattaagtcacatatggcagcacacacctgttatatgagcactttggagatagagacaggaggatctggagttccatgaaacactgataaatattgactagggcacatcacactctgctgcactagcccttgacttggatttggtcatgtgactaacactaagtggaatgctcacaaatgtgcatgctgctaatccctggggttcttgtttgcatccctgtagtcctggatagaaaatacatgaagatgttagttctcaaagggaagaggctataaaaacaaactataactcacactcagcctgactccaagttcaactgagcctagccaaagatcagttgcttgtcagctgacctcataagcaaagactacatactatgtttagctcactgaagggtatgtatatgttcatgtgttggagattgggagggtgagtgtcatgtgtaggtggccacagatacatgcacatgtttgtacatgtgaatatgtaagccaaaggacaaacttggttgttgggcattgttcctcgggagtcactgtcaacttccttggttttgtttgtttgttttttgtttgtatgttcatttgtttggttggttttggaaacaggatctccttactgagacattcccatgactgttaatttcatagaattactctagcagcattttatgaccatattacctatcaggtgtgcgtcctatgacatccataaccatgccattattatgacagccacaataaacttcacattaaagaagtcatcactaagtgatagaacacttgcctagcacactcaaagttcctgggttcatttccagtagaagggagagaggggtgagggagggagggagagagggagaggggagggagggaaaagaaaaaaggaagagaagagagagaatggaaggagtgagggacaaaggaagagaagaaagaaaggagggaagaagtcatgtttcataatcagagaatactaacaagaatggagctgaacatacataatgtagatattagaggaaaaacatagggcttaacaacactgattttgttacaaataaatgaagtccttttcagtatatagtattgttatatctgctttggagatcataaatcaggcacagcaattaaccaggaagtggcaaaaatgggatttctgctgagatttggttctaaataccgtgtgccaccagtaagtaagggtggtctcaaatattctaatgagcagatgcacaaagttgtctctacagtttatgggatgtcagatatcattcagaaattagagggctttagcaagagcctgtgggtcacttcaagatactatgccactcacttaggtagccctacttcccctttggaaacatctaaaagtaggttgaaagaatcctaataatattttctgatgaaagttctagagcctggatacagtggaagatcttcactaagaagagctcaaaacactcaccctcaagacatgaactaataacagtctttgccaaatggcaactagagtttttccatggacattgccttgtgaaaattgtctatatttaaaacacatgatctgcagctgattcaggcatgggtgataacctgatcattggatgcttggccttatgtaaaacttattgtccccaagtcaatagagcattgtagagttgtttcacttaggtattttacagagaatacaaattgcatgggttacctattctctagttcaaacatttggaagtgataacatcccttgtagagattctcctgttttccatccatgtaacatccttactcatcagagagttggagggtttctaagtttggccccatctgggtattgaaaggaagaatattgaaagcattctgggcaagagtatcgcagttttgactgccaaatgaagctttcagtatgcaaaatgatacccttttcccttcctgttccattatgggacaatccatgcacagagaaataaacttagtatccatccttgaggccaaaaagataaagcttaatctaagtgacaccaattttaagctgctctcaagatagcagttcaaagttgtgttttaaaagcagggtgactgaagatttcaggttgggaaataaatcattgagaagtacttaggcaagaacatagtggtggaggtgttggttagggttgagccattccacaagacatatgtgtgggataactttcagctgaatgatttgaaattctcaaatcagaagtttcatctgttacaaattatgtacaaaccatttatagatcctacagcttcttattgaattatgctaattttcaacaaattattatataactgtatcagtagatgcaattaacatgatgtagtatagaaacaactcaaacatgccatcatctcaccccgcctgaatatctaacaaaactggaattcaggaaagagtttcagagaaattaaaatatacatgagaagaactctaccaccagagttctagagttcattggttcaagttcaaatcaccagcacccattcaaatggcagatagatatcaagatctgcttgtaatcccagcactcctaaaacagaaacagggggtttctgaaccaagatggttagccagagtagcagaaacagcaaactctgggttcaacaagaaggaagacaactgatatgtgacctctacatgcatactttcatgcttgacatgtacccacacccagcaggacacacatacaaacaagcacaaacaccatacatacaactctacccctcaaaaattactctctaccctcctctcagatcccatttattcttgtgtttaaatatatgtaaataattctgagttttatagtctttgtaatgagtattgatacttacaatttttagactccaatttgagatgtcttatgtttttacaaatataaattttaaaagttggtggtgtattctccttgggtttgtaatgctggaggaattaatgcaagaagtatgttctcttcttcaaaagactggacatttctatttcaagaatagcagatgcacaaaacaactaaagaacaaaatacagttgctctgtttgatcacatggagcaaaggaatggttttggccagtctagcatgatgaaggccgtgacaacatgcttcagcccatattccccttgtttgaatattagtgctaatgacaaggaatcaatctggaaagaacattttacttttactacaaacctttaccatcttcctaccactttccatgggaatgacatcattgggggaaattatatgtaataatcatttctttattgtagacagaagtttctgtcctgctcaggtcctgcagttgtttagtcccaaataaacacacagaggcttatcttaataataaactgtttggtcaatggctcagacttcttattggctagctctctctcttaattattaacccatttctattaatatatgtatctccacgtagtcttgacttgctggtgttgtctcttgcttcctcagtagctacatggtgtctccttgactctgcctactacctttctttatccttgtttggatttcccacatgggtaaatcctgcctgtccactggctgaaacagttttattcatcaaccagtaagagaaacatatatttacacccatcactttaagccttcacagtatatgtaaagtcaaccttgaaagccagtgctttgcccttcaagttattggaaaatatacaggcttttcaggtcacgtgatcaatgtgactttataaggcatctgaaataaaagccagtccaggatggcttctgcttgacactggaatctgctcctgtgcagaaaactaagcagtctgtgaaaagtctttcttccctgcttctcgctttctcactagcttgtccctcccccgaggtcctggatttactctgcagcttgctgatacatttccaccccaattgatataggagtccctcttcagaatgcactaaaagactcctctgatccaaaactcagacaggaagaattaaataatcaaagggagagataaccacatgctaatttttcacctcaaattaggatgtctgagaagcatgttgatccttctagaaccttcttttgcctacacagtgatgtaaagctgtactataatttggacttgaaatgactcctgaaaagtccctgtggaaaggctttatctccagtccagtgatatgggaatgggtgaacctctaagatattcagcctattgggacatggtgagttgttgaagaactggctctctaaagagataatgagacttccacctccatcccttcctacctttgactccctgagcaccaaagtggcagttctctcattctttcatactctctgccatgtgttgccacaggccctaagtattagcaaatacctgaagcctcttctctttgtaggttgctcattaatttcatttgttacatcaagctttgtacacaaaggcaggactcttcccattctactgctgctttcttttgggagagcaagccatgacctcatgactacactatctaacagtagccaaaatcagacactttgctcttgggattgctatgtttccaggtgcagagttctccatatttgcagaacaacatacatcatgatcttctatgacaccatccagtgtctgtctaaagctgtttttttgacgtttagatttctagtcttaaaacacacctaaaattaaatttttgaaaagtttgaaattctctgaaaatttcccatataacaaaagcagagttcacaaaaaacagttgactttggagtagatccctattttaagatttcattctattcaaaaacatcaaactgaaaaaagaattatgactgagggctgaaatttaaattaccctatactttcaaaaacaacttctggtgtgaggtgggagataagatatacacttatcaagagattccatttttacattggtctatgctattgggagctaaagggcttcttttaaatttggaacaagtaagataaaatagttgttattcttatttttgaagtccttgaagggcagatcaaatgaagcttatccatggtaataatgattgatgagtttcatctaataatttttaaatagatgcaaacagcagtgaagctccagttcggggaagggcatttggaagaggcacaaatagtgtcaattagcagcatttcagagcagggatcttaactctagcattgtataaaggaagggggttaatgttttaattttcaacttctgcgtgttcatctcagctgtatcaattagaaatcgtggatactctaaaatttagttagtttataagaaattcaaatctcactgcataaaatgggtacttgcttaattccttcttttcactcttgattttaaattctatgaggttagagacctcgtctctggttcctttttgttgtaaacgtgttcagcataatgcttggctctcgctaaatgaagactggctatgactgaaagaatgaagccatttagcattcagtggattgatgtgaaaatctccagtggtgcaggtgttgttcttgttgtacaggggcaatggtgggaagacaggaaaaatacccttcctttgtggagtttatattctttctgatgaggaaaaaatttcaaaacaaataataaaatgatacaaaaacaaaatcttagttggagaggaggatggagtattagttgttggggtgacagaaagggtggagtattagttgttggggtgacagggaggatggagtgttacttgctggggtgaaagggaggatagattattaattgttggggtgacagggaggatgaaatattagttgatggagtgacattgaggatggagtattagttgttgggatgaaaagaagtatttttgttggaattttcagaaaaggtgactttggtaagaagataactttcaaggggagatctggagaaaggggcctgctccccaaagtacagtcatagaagaaatcctctacacagcaagtgcagaaaatgccaagactctgaagaggagggaacttgaagaacatagtatagtggccaatgtgacaaactgcaaacaatcagaaggaaggaaggaaggaaggaaggaaggagggagggagggagggaggaaggaaggaaggaaggaaggaaagaaggaaggaaggaagggaagatgacatcagagagggagataggagggaggggtcatccaagacctgttacttaaaacagagactcttactttcattctgagatgcagaaaggttctgagagaaacatgacatcacgtgacttatttctgaacagggtcactctgtgctgttaatacactaggtgagcaagggcagaatcaaaatatagatggctcatatgtgacaagcacagacctggtactgaatcaccttagtgactaaaggggagctattaagagtctcagaggaaatggttgtaccctgccaacagacataaatggaggacctgggttgacacctccttcatggagcccagagtcaggcagcagaatgaagtgagcaacagttaatgaaaagaagagaaatcccttcctctgaggacttactcaagctaactccagaagctaccctatttaacattcctgccctgtgccaccagctgtcacacacttaatggcaaggcattaaatggttgtaaggaagctgggaattcagattttaccgagatggctgtattgaaatttcacagcacggtcatcaaagagcagctatttacaccaacatcttccaacaaaatacacagtgctctttatacaaaccctggatctgttttcttgaggaaaagctaaaagcttcataaaatgtgacaaaactcatgactttgattaaatttctcctcaaaacacaataattagacatcaactgagactctgtcccagagaagtaactgattccacttttacttctgggataaaacaaataaacaaacacaaaaccctgacagtgggatagaatgtgtttccagtggcctccacttggcaaacaagcagctgagcagtcagtaacctacccttcctttcctcccactcacatgttggaagtattccattcctgggactgcccttgccttgttgctgctctgagaagcgttgcaggattcatccccagcagttacctgagcatctgttttgtcctattgtcagtggtaattaccagggagaagtcaaatacacattgatttcttcggcgcttactttcgagtacttgtggagtttaagagaggaagacgagaagccaaagaagagttgcccatcttcctaaactgcctctatcagtgatctccagtgagggaaaatggacaacaaactggaatctattcccccactacagtatgtgaattgttgtctcttatgtagtactaagcaaagggaagatgggagaccaacggcttgttctggagtttttgtgggcttatactggaaatttgtacattgtaaataaaatagaagccaagactatcaaggttttctcatttttaaagtatcttctaacaccttttaagttttgttattatttttgtccccacagtgacttcagtttttccagttgctccattgtttggggcaactacttttgagacaatgctcatgacagttggctcgctggaacaaatgagagctattcctggttgggggagaaggttttgctggttctgttttgttaccctctcttcttctagacaaggaatagaggtcagagttaatactagagtcagaaacagcactaccctctatagagttcttaaatgaatgagcctctgtcataggagaggctctgtgtcttcattgcctcaaactactctgttacttacaggccaaagtagtagtacaggtacagcatggagctgtcatgattctgggcaaatgcaaagtttacttgcagtccagattctaaacagaaagaaattcttccagtcacaagatcttttgaatctattccatctgttaaaagccatgagaagagttaagttgcatcagcccagaattctcaccaaggcagaaaacataaacacacaactcagcttagaggctcatgctccatacccctatattatgggatgaccttgtgtactaggcagaatttaaatgagtatgaaaataaatattgtattttagaacaaaagtttaaaacataatgtcagaagaccgcttatctctaggacaaaacaatgaaggacataaagcaataatccagattgattagacatgttccctaacacttctcaacctatcccctagaaacagaagagactggtaacagaaactgccttgtatattgtatgttcttttctaccataagatgtatgctgcatatgtatactttcttaaagattttcccatcatattcagcaggaaattaagccacaaatgaattctaaatgtggttatctgtatctctactgataaattaagattccctccacagtatacaaaaagccatctttagaaagatggctgccttagtggttcctattcttggaagtgtacacctctagaaaggcctttgacatgctgctatgaattcaattatttttttctccctgtggttgtttgaaagaaggtggcacccaaagggagtggcactattaggagttgtagccttgttggagtaggtgtgctcttgttggaggacttgagtcactgtggaggtgggatttgaggtctcatatatgctcaagcctcacccagtgaaagttcactttctgttgtctgcatgatacagaactctcagatccttctccagtaccatatctgcctgcatgcagctatggttcccaccatgatgataatgtactgaacctctgaactataagctaccaccatgaaatgttttcctttaaaatagttgccatggtcatagggtctcttcacggcaatagaaacccaaactaagacattccccttgatatgggctgtccttgttgcatggcttatcaagccaatggcatgaagaagtgtgacttgagaaatttccttctagaatgcctggatcttcttctcttatcctgttgctgccctgacaagtaaggaagtctggcctccctggggttgcatcacgaggaaagagactttatgggataggcccaatgatctctattgaggcctcagatgtgttgcagagactacattcaaacagtgcattttcagccaactcaccaacttacaggagccctatcacagacactatgcagtcgtatagaaatacagcctatgcaagaaacctaccttaaagcagccttgatccacatacccctttcttacttgtagtatgttcaacatataaatacatgattcagaaaagactccatgtactctgaaggaaggagccaccctagaaggaccatagcttctccttagtagaggacagttggttgtatcccatacctgttccccctcatctgaagagagcatctggcaaagagctgggttgcttggaagcaggtgctttggggccaggccttgcctctaattaattttctgcttctaggtccaccaagattggaacaaaccataaaataatctcccccagcatgggtgaagccgctgcagcttgcatgccttccccaccatgatggactgtgtcctcgaaactgtcactcaaaataaatcctttctcccctgagttgtttctgtcagtgtttgcccacagtgataaagaaagtcactaatgcacatacaaatccagtttgcaaagcctaagccagttatataaaagggaacgtttgagggctagagaggtggggtcggcagctcttagagaggtcctgccttgagttccctgcacctatattgagtgacccacaacttcctgtaactccaggtccaagaaatccaccccctcttctggcctttgtgaacacctccacacatgtggaattcacacacacgtacacactttacaaaaacaaatcattaacaaactgaactcaggaacaagcagtgagcaaacagctttctttttccacatggttcattcacccaacctttctctacggctctgtagagcactgggttcaaattctgtggattctagatcatactcagacattttaatttttaattccatgctctgagttcattcatgacttcactcctattttaagtcctcggtctatgtgttctagaatccatgctaaaatttcaccccagccgttgttgtggacaactgccctgtgcatcaaaggcagcttagcagcgtgtcctgttttattgagttgatcccagtatgactttccccagtttgagcaaccaaatatacatatgttatcaaaatttctcttgggatacaaaatgctccccacttaagatttattgctctagaaacagcattcttaataggggtgatattgccctcgaaaggacaaagggctggtaggaatgcaaacatttctcagctgtcccagtgatgtgttgcccctcaaaaggccaaagcatatagcatacaatgaatccatagcacataatgaagagcaaagaggagaaagcagttaggggtaaaggtcagacaggtcttgtggagaacagaaatgataaatgcaggacaaacgttgcttttagggcaacggtgggatgcaaggcttgcttcttcttctgtctcccttctttactcagcagtaaggcaagaaatggaaggcaaagtctgttttccactcttgttatatagtcccgtttactggttaaagtcctcctgctatgactactgtctgaaggcatgtctcactgaaatggtaacctgggtggcacttcacaggtcctcactctatactactctgaagctgataatataacctctaagtactcttcataggttaaccaaaccacaactctcttctacaagcccatggtctctaaagatttttcttaaatgtggttatttaaagatggctttgatgtgactactcatttccaatccaggaactaagaagtagtccaagagatgatttcactctacccagctgtctacacaatatctgtgccctgaaacttcacaagggagcctgagtttaaaggtgattgatcaatcagtctggtagaaaaattttaaaaagaaccagagtcaaactacagtgtggttactaagatctcctgttagccaggtttatatgagaccagaaagacttgacagtcttgcagtttggtcatagaagccagtgcaaagttgccggtagagaaggaaaagaatttgaagagacattttttaacctggggctggagagacagctcagcagccaagagtgtgtagtattcttgcagaagactaaagttcagttcctagcacccacagtaggtgactcacaactgcctctaactccagctccaggacctctgcaagcaccagtagacatgtgcacatacccaccacacccatgcatacacacatacacgtaatgaaaaataaagaaatgaaaatttacaaaaaaaaagaaagccaggcacagtagtgcatgcatttaatcccagaattttctcaggagtcacaggcaggtagatctctgtgagtttgaaactggccttatttacatagcacagtgtttcttaaccttcctaatgctgaattctttaatacagatcctccttttgtggtgacccccaaccattaaagtgttagttgctactgttatgaattttccaaatagtcataggcaacttttgtgaaagagtcctttggccagcttgccaaagggctcatggcccataagttgaaaaccactgatatagagagtttcatacctatcaggactatgttgtaagaccctgtctcaaatgatgataataataactgaaagaaaaaaaggagctatgtataccacaggaaagataccttgagtaaacctgaggaattatttggagtccaaattttgccatatcaagtacatggaagagtaaactcattagaaaggcttttccctgagaagagagaacctgttgggtattctgcataaacacagcttcctaggaacttccctaggactcactttacaaggttcagctgcttgggctctcagaagctgccacagctgtggtttatggaggctcagctactactcaagcctgtcatagacttcagcattgaaagtataaagccagttttatggatgtatatggaatgtaacagaagcttctaccaggatttgaaacccaagcaagagaggccaggcagtatgtggcagggttagaattataatggctactctctaacactgtgatgtacaaagctgtgagaataaagacaaagtcacaggggagactccattgtattgaagatttttggaaacctaggctgtctaccaagaagctctttgggcagtcaacagaaatggcccaagagagaggccatatggactgcaaatggcaacaatgcaggagcaaggctgcccaggcacactaaagctcacatcatgacaacaaatgcatgaacacaaaacatggagctacaggatttatgtgccctttgctgtttccagtcttctgttgactcaatccttccttttaatctcatattcttcccttttggaataggaatgcctaatctgaagtatcttacttctggggttatgtaacttgttttctcagttttacagatgatcacagttaaaactgaaccttgactttaataatactagagctggtgtaactattaagcactcttggagatgattaaatgtatttctatcttgagatggatatgagtcttttggtggccagaggtggtctattatggttaaaggatgaagtgtctcactaaagaacttgaattaaaagctctggtccctacctagtggtgctatatttggacattagagaagtctctagaagataaaatcttgatggaggatgcagaacactgggtggcttcttgtgggcatcttgttcctaatcccttcttatccctctgattcttagctgccatgaggagaacggatcttaccatgtgttcctgccaccacggtgtcctgcctcacataaccccagaaacacagagacatgtggccatcaccaaaacttcagaaactgtgaactaaaacagtgtcctcttatttagtttgttttgtgagtattttggttgcaacaatgaataattacatggaataggaaaacaaagttgacagttaagccatattttattaagcattgttagaatctatctacaacctctctgaacaaccctttgacttaatttgagaacaaaattaaaattttctgaaaagcaaaaaaaaaaggacaatagtcatcaaatgcctatttttatagccaatttgtcagtcttgggtccatatggaaagaagagaattttagccaatgttttccagttgggaagaaaactgggagttattatgagtctgctacctcactaatacactttcattcattcgtgaacatttaataagcacctgcgagcacaggtgctcacagctctagacaacaagaaaggcaaagcctgaaaccatggagaatagtctaacaagaagcatcaccaacaaataattaatttcacattgtaaaaagtgttactgaaacactcaattaagagtggctggggtgagtaagtgtgggtttgtattgagtggtcatagaggggatcttcatggaggaatcatctcaggcagacttgagaagacctcgggaggaaagagtgcaatgaaaggttgaacaaatctgacaaccaaggtatagagatgggctggctgggttctggagagaatgaagtctttgtgcttgttcttggaatgtggagaatgctgtgagtctggagagacagaaaagcaaaggagaagatgttccccagtagttcttgggaatagcataaagttctgtttccagtgtgatagtcactccagtcatagagggctccactgctcccatgtgctcactgccattgttcaaatgcatgaaaatttcgaaaatgacgtagacattcattgaacaaattactagctatctagccactctccattatgaggatggtgacatctgttgataacaaaagcccttatgtctgaaaatatcagacaccagagcctgcttgactccctttggttgtgttgctattctatcttgttataaggagacataaaaatttgcaaaggaaaaatttatgtagggattccttacatgtcctttctgaaaggaatgaattctgtttatagtgggcagagttgagtgtacttgatggtgcaagcagagaaaccagattccagccccaggcaagtggctcttgcagtgtggaaggctcagaagcacggggtctgatctctcctgagatgctgcatatttacatttcaaatcactctaagtggaacaagatttgtaccttatcaccttcccaagcatagatttttttcctaatcgaggttataaatacagttactcctaatgatgtaaattgaaagcaggctgtttttactggctgctgccaaaatcatcatgaagctacctttaacttactatcagaggcttatttaccataattgactttctcactgttttatcttgtctttgaccctggacgcccaagcatgatgctcctgaatttaaaggagaaagtgattaatgtggggagagcagagacagccacattggggaccccagtggggacaaagaagaagcctgataaaatactaaacagaccaccatctcctcccatgttctctttttttctgtgtctttcagggagccctttaatgagaagtcactgattttaaagccaaatatatttatgccagggtcagagggaaatatttacatctaaaaatgctgaaacatgaaacactagccacaggaaaggttactcagatgaaaaaagaatagaagtttgtatcaacataatttacataacttttttttccttcccccaaaacaaattcttgccttgagagactaatccaggtagcccttttgctccagtctcttaatgagacaaatccaaaattgaaagcttctggggctctgtgtaaaatcctctaactatgaggaaaaaataacaaagtaaatcagttctgagaagatagatgactggagaagagtggctgtgagaagttaaagaacaagcttggacttcaaattccttctgtgtaggacattctgaattagaaatggaatatccggtttctaatttctttctcatcaagagataatgagtactacaattcactttggttttcaaagatcatttatatcttcctcccacttcttacctattatctttccattctattgccccttgggtctgtttggaagcatattagtttactagaaatggtgctcactccttctgttgagtagtaaaattacccaaggcatggatagagagttagtggaagcactgaatatattaatagaaaaatggtctcagtggtgtgaggagaaaagatccaggaagaaggaagaacaagacagaagcatctctggcccttgggtgactggattagagggaaacatgtctgtcagaatcaccctttattcaaagcagtcagcattatcccattttagagatgagttggtggtaatttatcttccatctgcacttacaaatttggatttctactaggagccttagaataacttgggaaaggtcttgggtttaaaacatggctctgccgtgtagtagcaaatcatgtgaacccattgtttcaggttcttcacgtgtaacatgaaactgtggcatacccatagttggaaggcaggagccttggcccttcgaaactgcacagaactttccaggggctgtgcctcatctgagcggtaaatgtctgcccaattttgagccaaacaatagcaatccacagacttgctgcatgcccttatctgtaaggagttcacaacgaactaggaatttgaccaagagaagctcgtaaggaatcttcacaatttattaacattctcccatcagtgtctttatataataactaagacttgtaaaatcacaaaaccaacttcaaggcaaaggatactttctcagaattactcaggcttgggtctaggaagatggctcagtgtttaagagcacatcaggatgttcaagaagacctgaatttggttcccagagtccatggcaggcatcacacaactttgtatgatgccatctccagggggatgatgtactgccatttttgggcaatacactcacatacacaaagccattagacactcacatatacacaaactaattaaacataaaaaactttttaaagacacatgtacatatttatacccctgtaatacataaataacgtgtgtgtgtgtgtgtgtgtgttcctgtgtgtgtgtgtgtgtgtgtgtggggtgtgtgtgtgtgtggttgtgtgtgtgtgtgtgtgtgtgtgttactatgaaataaccattataaggaaacactaagtacagaacaaaggaatttcatgttcaaatcacaatttttattagcatattcactaacatcccttgggtagggaacatgctccctttgattttttcttacaaaataaaccaatttgggtgctaagacaacctcatatctgggtgtatactaaccacagtgagaaacaaggaatcttcagatttatgatagttctaccctgtttgacatatagttaactagttcactatgcattctgaaccatctcttttagatactatgctagtacttattgtcaaataaaacaaatttccagttttaagtgaaatgtctgtactgtgtttaatatggaaggttaatgaagaaaaaattcatttctaaactatttttatgcatgtgtcaaaatatctcacacattttactgtgtagcatatacataggtctgaggaatccctatagccagtgttttgaatggaaaaacaaatactgaccagatcattgtgagtcactggagctgagacagggagattgttcctaagaaactagactagaaatagaaacttcattgacatgaaactcaatgttccagaactaagactgaaacacagactagtctccaacagggaagacttggattaaagacactgagtctttctcccaggcaccaaaagaactggtgggttcagtcaatgccacggtggagaaagccaatcgtctcagtctattgatctgaagctaagttaagtcagtcaaagcaatcaatcctgttagtccacatgctaagtgagaacggggcagagtcaatcactcagggaatcacattggggaaaaaaaggcttttgtctgtaatggatatttggcatgcaagtgtctctggcctgatctaccctacaacatgcattaattcaccacttaaactaggaagagaaggtaaaattaaagccacttacttctgagggaactcactggtttggtcttccgtctctatgacatatatgcacgctcacatacagacatgtccacacattaatcatctgtgtcagcttgaggaaaaattcatcattagaatggaaaattcagcttgacatgtttttatttatatcttccatcagggaccttcattctccttggggaagttatggtctagtttcagaacttggtaaaactgacagatacacacactagcatgtatatatttaacattctcaaatggggaaaaaatgttgctataacagttacacatgctttgtagattctctgagccattaaagtagagctgagagcctctgctttgtatacttatggtggagttagttataaaggtcctgaagtaatcaagataggaccacacaggcaagggcataaaacaaaatggtacagtttggtagaggtgagtgttggatcatcctgaaacatacactgggatgggaagtaagaggacactaagcaggagccatggagtggaagaccacacagatcacactgcaaagttatgcaagatgcagctgggccagcattacttatcatgagtctatgtgctgatatcgagaaaatctgtgcatgttgacaaatctctgaatgatattaagcatttagaatgaagtcagaattaaatcatatgaaggtcaacttagtaccaagcacttagagttattgccttatctgacataaaacagaccaaagtcctatgctgagaaacaacgtacatgagaaattaaaaaccaagcctgtagactgcagtgcagacgcaaactcaaacacacctggggatggtgattataaagtttataataaaagtcaacatttgggctggggaaatggctcacagggtaaagcacttgttgtgctgaatgatccccatcattcagataaaagctaggtatgagttgtgtggtggtgcctgcactcaggaggcagaggcaagtgcagctctgagttcaaggccaccctgatctacagagcaggttccagaacagccagggctacacagaaactctgtcttaagaaaacaaacaaaaagctaggtttaacagattgtacatggaaccccaaggctgggagccagagacaaaaggattcctgagggttgctgtttagacactgcaggcagttggtgaaagacctgtcccccaaaataaggtagagagcaattgaagatgttacgctctacactccatactacactcatacacatgagtctacacacacatacctatatatatatacagagagagagagagagttgatatttcacataagagagggaaatcaactattcaataagaattattattaaatagtttaatttgtactattaaataatttccatgtgatatatagatatattctatattatatataataacttatactattaagtaatagtataaatgaggccattcaataataatgcaacaaaatcaattagtatgaagaaaatattaatttagattgcagccccacaactggagctagaaaatttcatactatatttataaactacagatagttttggtgtacatatgtgagaagaagaaaagtgagatgtttttataactttatagtgtaaaagacctccctgagaaagacagaaaatggaaatgtctacaagataacagttacctttgaggtcataaaatttgagcatgttgttacaatggaaagaccatacaaacaaagtatacaacaaggctttgaaaggacaaagcccccaggcaagccaggggctgtttgcagttccggttctgtggccctgctcagggatatctaatgccagggtatctgctgaccggatctgaaattggcagcaggatccaacacatccagacactgccaaggccctggtaacattcctgcctccatccactggcccaggtaggccaagggctgtttctagttccaattcttcagtcctgctcagggacatctgacgccagggatctgctcactagatccgaactcggcggcaagatgcaacacacccagacactgctaaggcccctgtaacagtcccagctccatccacaagaagaggacagacatcagaatattggaactgtttgcatctaccagaagggaagcttggtcccagacccaccaggagagaaagagactcctgctacacgcaccagaagaaaggatgagaagaggacaatgtaaaagcacattcaacaacagaaaacccaatatgacaacaaaggagactaggaaccatacaccagcaagacctgaacatcacaatgcagatgtttttataattttatggtagaaaagcagaaagaatgaccgtaaaaacatcttcatgaaaatgatagaggacctcaaagaggacatgagaaaatcccttaaagaaatggaagaaaaatcaaaccaaaaagtacaagatatcaacaaatctctgaaggaaacagttcaagacctaaaaactgaaatatagacaataaagaaagcacaatctgagggaatgatcaggtaaagctgggtaaatgatcaggaactacagaggtaagcataaccaacagaataaaagagatggaagagagaatctcaggagatgaagacacactagaagaaatagaatcatcaacaaaagaaaatcttaagtccaacaaatccctaacacaaaatatccaggaaatatgggataccaagaaatgcccaaacctaagaataatagatatagaagaaggtgaagaaatccaactcaaaggcacagaaaacatattcaacaaaatcatagaagaaaaccttcccaacctaaagaaaaacatgccaatgaaaatacaagaagcctacagaacaccaaatagactgaaccaaaaaaagatctccttgccacataataatcaaaacatgaaacacacagaataaagagaaaatattaagagcagcaaaggaaaaagtcaagtgacttataaaggcaaatctatcagaattacacctgacttttccatggaaannnnnnnnnnnnnnnnnnnnnnnnnnnnnnnnnnnnnnnnnnnnnnnnnnnnnnnnnnnnnnnnnnnnnnnnnnnnnnnnnnnnnnnnnnnnnnnnnnnnnnnnnnnnnnnnnnnnnnnnnnnnnnnnnnnnnnnnnnnnnnnnnnnnnnnnnnnnnnnnnnnnnnnnnnnnnnnnnnnnnnnnngaaggaaaactgcaaccgaaggaagttaactacaaccataaaaagataggcaatggataatcccattttaccaacagccaaaaggaaaaaggaatagaatcccacacataatttcaccagcaccaccaaatccaaaacaagaatgaacaatcaatggtcattaatattcctcaacattgatagtcttaacttgcctattaaaagacacagattagcaaaatggataagaagacagaatccatctttctgatgaatacaaaaacgcacctcaacttcaaagacagatggtacctaagaattaaaggttgggaaaagatttaccaatcaaatggacccaagaaacaagcagggttagcaatcctaatatccaacaaattgtactttaaactaaagtaaatcaaaagagatgaaggaggtcactttctactcatcacaggagaaatccatcaggatgaagtctcaattctgaacatttatgccccaaatacaaaggcaaccatgtttgtaaaagaaacattgctaaaactcaaatcacacacaaaagtgcacacacttgtagtgggagacttcataaccccactctcacctctagacaggaacaacagacagaaaattcacaaagaaacaaaggaactaatagaagttatggagcaactgggattaataggtatctatagaacatttcatccaaatacaaaacaatataccttcttctcagtgccacactgaaccttctctaaaatagaccacatacttggcaacaggagaataatcacactatagaattaacagcattactgaaagctatagaacacacagaagccagtacaccccagaggagcagacaccagtaaataatcaaattgagggctgaaatcaataaaatggaacctaggagaacaatacaaagaatcaatataatgaagagttggtttttcaagaaaatcaacaagatagacaaacccttatccaaacttaccaaacaacaaagagtgaacacaaaaatcaataaaatcaggaatgaaaagggagacataacaacagacacagaggaaatccagagaatcatcaggtcatactttgaaaacctatattcctcaaaattcgaaaatctaaaaataaaactaaaataaaaaaataaaaaaattcgaaaatataaaggaaatggacaattttctagacagaattcacttatcaaaattaaatcaagaacagataagcaacttaaatagacctatcactcctaatgaaatagagcagtcatcagaagtctcccatccaaaaaaagcccagggccagatggcttcagtgcagaattctaccagacattcaaggaacagctaataccaattctcctcaaaatattccacacaatagaagcagaagggttattgtcaaactctttttacaaggcttcaataaccttgatacccaagccatatgaagacacaagtgagaaagagaactacagaccaataaccctcatgaacattgatgcaaaaattctcaataaaatactgccaaattgaatccaagaacacatcagagaaatcatccaccatgatgaagtagacttcatcccagggatgcaaagatggttcaacatatgaaaatccatcagtgtaatccatataaacagactgaggaaaaaaacacatgtcatctcactagatgctgaaaaagcctttgacaaaatccaacagcccttcatgataaaggtctttgagaaatcaaggataacaagaacatacctcaacataataaaagcaatatacagcaagccaacagccaacatcaaatgaaatggagagaaactcaatgcaattcctctaaaattggggagaagacaaggctgtccactctccacatacctctttaatattatcgttgaaggtctagctagagcaataagagaacaaaaggagatcaagggaatacaaatcagaaaggaagaagtcagactttcactatttgcagatgatgtgatagtctacataagtgacctgaaaagccctaccaaggaacacctacaactgataaacaccttcagcaaagtggcaggatacaaaattaactcaaagaaatctgtagtcctactatgtaccgatgacacattggtggagaataaaatcagagaaacatcactatttataattgccataaacaacataaaataccttggggcaagactaaccaaaaaagtgaaagacctgtactgtaagaattttgagtctctaaagaaagaagatacctgaaaatggaaagatctcccatgctcttggataggtaggatccacatagcaaaaatggcaatcttgccaaaagcaatctacagattcaatgcaatccccatcaaaataccaacacaattcttcacagaccttgaaaggacaattctcaactttatacggagaaacaaaggacccaggatagccaaaacaaccctgtacaataaaggaacttctggaggcaacaccatccctgacatcaagctctattacagagctatagtcctgaaaacagcttggtattggcacaaaaatagactggtagaccaatggaatagagttgaaaaccctgataataatccacacacctacaaacacctgatttttgacaaacaatctaaatttatacaatggaataaagaaaacaccttcaacaaatggtgctggcataactagatgctggcatgcagaagactgcagatagatccaagtctatcactatgcacaaaatttaagacaaaatggatcaaagacctcaacataaatccagacattctgcccctattagaagacaaagtgggaaataccctccaattaattggtacaggagaccaattcctgaacattacaacactagcacagacactgagatcaacaattgataagtcagacctcctgaaactgagaagcctctataaggcaaaggacacagtcagcaatacaaaatggcagcccacagactgggaaaagatattcaccaaccccacatctgacagagggctaatctctaaaatatacaaaaactaaagaagaactaaatagacaattctcaatagaggaaactaaaatggctgaaaaacacataagaaagtgttcaacatccttagccatcagggaaatgcaaatcaaaacaactctgagataccatcttactcctgtcaaaatggcccacatcaaaaacaccaatgacagtgtatgctggagaggatgtagagaaaggagaacacttctccactgctggtgggagtgccaacttgtacagacactttggaaattagtatggtgactcctcaggaaaatgggaatcagtctaccacaagatccagcaattccactcttagacatatacccaaaagaagcacaatcatacaacaaggacatctgttcaatgatgttcatagcagcactatttgtaacagccagaaactggaagcagcctagatgcccctcaaccgaagaatggatagagaaaatgtggtacatttacaaaatggagtactcagcagaaaaaaaaatggaatcttaaaatttgcaggaaaatgggtggaactagaagaaactattctgagcgaggtaacccaatcacaaaaagagaaacatgatatgtactcactcatatgtggattttagacttagagtaaagaattaccagcctacaatccacactgccagagaagctaataaacaaggagtacccttcgagaaacatatgtggtcccctggagaaatggaaagggtcaagatttccttagcaaattgggagcatgggaagatgggggagggagataggagaatgagaaggaaagaggaggagggatgcagaggacatgagggagcagaaaagttgagttaggggaagaatagaagataacaagaatggagataccataatagagggagactaaaatgtttacagagaaatcaggcactagggaaatatctagagatctataaacatgacaccaactaacaatctaagcaacagaggagaggctaccttaaatgccctcccctgataatgagattgatgactgacttatatgtatagccctcatccagcagctggtggaagtagaagcagacacccataactaatcactgaactgaactggaatccagttgcagagaaggacgagtgaagagcaaaggggttcagaccaggctggtgaaacccaccgaaacagctgacctgaacatcgtggagctcttggtccccagactgatagctgggaaaccagcatgggactgattcagaccccaagaacatgggtttcagtgaggaaacctcggaaatctatgggacctcctgtagtagttcagtacttatccctagcataggtgtgggctctgggagaccattcataggtgtgggctctgggagaccattccacatagaggaatactccctgagccaagacacatggggatgggcctaggccctatcccaaaggatacaatagactctcctgacaccctatggaaggcctcaccgtccagggggagcagaaaggatatgtgatatgtagggttttagttgaggggggtggtagggggggagggtagggagagggaactgggattgtcatgtaaaacaatcttgtttctaattcaaattttaaaaatctccaaaaaaaataaaagaaggacaaagccatccacagtactttcaatgaaggcataatatttgtactagataaaaatctattttggcacacccattgattaaggaaactcaaacaaccagataggagaggggaaaaggcatatgatcaagagagtcccaaagttaaaacgattgtaaacttatgaaactaagccatcttcctggttgtcagaggactacaaagcttttcagtagagtattaggcatttctaattgtagtacgaatacctcactcaagacccacagactttgaatggatgcagtgaggcattgtgaatcacaggcttgatgctgttttgtagatctctgtgattgctcatcacacatacctgaaacttcatgaccatagagcagcaactagttatttattgtttttattactcagatggcctacagttcacaaagacacatataaactacaagcagggaagcaagatacagacttcttgtacacattccaaatgagcacaaaggagcctcaggtcttgtccttttttcttctgttgtaataaaacaccctgacaaaagtgatttaggggagaaagggcttcttctgactcccagttccaggtcacaatctgtcaccatgagaagtcacagtaacaggatcatcagacacctggtcacatggcatcagaagacagcaaggaccgcatacatgctggagctcagcttacactctccactttgtaccatcaaaggatcacttgccttgggaatagccccactcacttgggactacctccactcgttcaagataatatcacttactttgggaatagccccactcacttgggactacctccactcgttcaagataatcctccataggcatacccccagacacttctctcacgagatcctagatgctgtcaaggtaacagttaacattaactaccaaagaaggccatctgaggtggaaatcatagtgtccttagggagcatgggttcttttgagcagatgtccaccataactagcttgtgaggtctgtcagtagaaattctccagtacacaccagctgaatgtcaacctcagttttaagaatctatggcaaattgatgcttgtcaaagtgcagaaatgtgtgcatacattggtgttcatttataattgttttggaaatctaaagaaagaaaaaaactgaagtcaatctcacttatcaccataaaggaaggttaagtaaatgatggcatattcatgccatggattattagtcagtgtttaaaaaatgaacagagtgaacctaaagagaaaaatatagaaaattgtagactataaagtttggtttttttggtggttttttttttctttttgcaagttgcaaatcacagaaccacttgtgtatttaatttagtatttaatatagtatgcatattgtggtatcttattccatatgttaacctgactgtatcatggaatgtgcagacaaagataaagatggtttctgggtgttatgctgagggagtttctgaagagatgaactttgagattacagatggagagaagaggattgtcccttctctcatgatagctcaggcatgtatacctgagatcaaccctgagaacccagcaagatagcatgctgcaaatgtgagttcttggggctcactggctatccagcttaatctgcgtgatgagttcaaggccagtgagagaccctggcttaaaaaccaagggtcacagacagatgacaaagtgctcaggatattttgaagctaccctctgtcctctacgccaccccacatgtatgcatgtacacacgggtgcactacatggcatctgcatatatccccaacacacatacacatgcacatgcccgcacacccgcacacagagagacagagacagaaatagacagagacagcaggtctctttgttcagtatggatgaggctaacaagattgctatagattgaataggaaaaaactgtaaaagatccaccctctctctgcccaactgcttaaactgagccatccctgtcctcctcccaccctaagtgctcatggttctcaggcaggcatctgctcattggctctctagctcctacgccgatgcacgacagcactggccttctcaagtcctcagattgcagacttctctgcctccaaaatcacacaagacaaccccataaaaccattttgtagatgtcttcatttccacagctctatctctgcagagaacctacacatgtgtacttggatgtgtaagcaagcatacaattcagtgtatgagaatattctgattcatacaaaagcgggtacctagatgtatggccaaggggcagttgcttcctctagggaaagctgtcagaggcaaaggcagaaggagggagagtggcttagtggcttgctttttctgttctctgaacagtttgactcagctacaatgagaatgcatcttacaactgtaagtattatactcatatatgtaagaccatcaaaatactacacacattcacctttagaactcaagtcagtgtcacctctgagcatatcatctgaaagacccaagtgtgaggaatcagccttatctcaggaacagcattttatgtggaatttgaattgacttttaaaattacctaatttttcagtttgaaacatttgacctctgggtttcagccagcgtccttgcactctctttagtcgaaatttgtgctttgctttaagtaggactcttagaagcacatggggaatgcaggttagctcacttgttaaacatagaatggcctgagccaaaagccatgagcataatcctctctatatttttcaagccagctcatcatttgcaatccacattcccttacatagttacggtgttttctttcacatcctgcaacactgattctgaaaggtgaagggtgaggcgaggcattaaggtgcaagatgactgagcctatctctataaagggtattttatttgccataaaaagctgccataaacatgaactgtggtacttagcatatgataaagaatttaaagataacttagaaatgtaacaaaaacctttgtactgccaaatatttccccatagttaacagaacaacagctcagaggaaaacttttggtagcttaattaagagaattccatctagatgggtgcatgccttgagaaggctgcatctgcaaataggtacactctctgccttgggaggtgttaccacagaaagaacaccaactctccagcacaaatctatctgatctaattcccactaagtttctgatcacatttcccagtagtctcaatatatatattgagacatggtttctttgtataactttgtaaaccaggcttacctcaaactcacatagatctgcctgcctctgcctcccgagtgctgagattaaaggtgtttggccccagcacccagcttaaatagatataattttcaacattatgcactcaccaaattaacacctttagaatattttcacccaggagtaaaagcaaatggaagctccatctccattcattcctattcttacatagggtgtctggagaacggaatggtgctttgcaaaagtggtgtgtatttttctgagataactgggcatgctttcgtttacctgcctgacatatgctcttcctggcctcctagaagacaatgaaccattgtttttcaggtgacaagaatatactcactgaatttgggggaacctaataaagcaataaaagtctcacttgatggcagtcaaaactctgtcactctggtgggagttggagtcaattggtattttacctctagttccaattattaatttgacttttgggtggacattcagtgtgagattacagttcagacaaagagtttcataggttaattagagtccttcatatcctttagaggagactttcccaccaccattagctgtaggcagagtcctgtacttccctttcccatgttgacaaagatcccagaaaatgcaaataactggacatatttttaggatttatgtatttattatgaacacagtgttctacctgcatgacagaagagggaagcagatctcattacagatgattgtgagccaccatgtggttgctgggaattgaactcagaacttctgaaagagcagtcattgctctttacctctgagctatctctccaggcctcatgacctttcatttttttaagatctattctaattctgtagcctaagctggcctcaaacttgtagccatcctcctgcctcagcctcccaaaactaagattacaggtgtgagccaccatagcaggctgacattttaaattttttaaatatttactgggtatttctacataaatactattgacagcacagcataaatttttaattcattttctgttctatcttaatctttggctgaccttgtctggtatagcttaaccacatccaaactcttcagaacaaaatgtactgttactgaatgttacaaagaggccctttgtttcccctgcaatctgaaacaccacgttccagagatcaagactgcagagcaaagtgaatattcacacattctcagttgtttcaggctatttcctccaaaaggtcaagactttaaatactcccaggcaaaaatgagatggctatctgggtggccaaacagggaaagatgggtgtacagaaagcaacccatgtactgcctacctaattattccaaagagaaatttaaaaatggtaagttcacaccactatactgtttaatcaaggattggtaccgtttcatatccagggccagtctgaatcgccagaggcctgtattgtgtcaggtgtccaggcaacaaacctggctggtgtcttgaaaagtcaagggaaatgacgacatactgtttaacccacattcttgacacagatgggaaaatctggcagagctgaggttatccgtcagccctggggagagcaggtcccccattttgctttcacctggtctctccaacatattgctctgatgcggcatcaaagccagaaaagcacatctgaaaatgaaaggtctatcacattccacacttcttttgaaacatcaaaaagccacacaaagaagcaatcggactagaaaacctgacgaggagcggcatagtgtgggtgagaatgtagcagtagctggaggtgaaccaacgggtggtccatgaaaaggcaagagaaaaccagaaatgcgtgctgatgagatgaaaccgcccacagctgtgtcatgctaatcaaaagttaatttcagctctcagacactggtcatggttcctcacagttgaacggcccagagctcactcactgtgcagcatcacctgccaaggctggatctatttacaagctcccagaatccagagagaagcgcagggaaagacgctatgcctggaagatgctcacaggttaagaatatgtgtggtcctgttggacagtgaccgcagaatccttgcaaactccagctttggacttcgagtaaaccctaaaactattcagatcttccctcaggtcctctacaaaggcagcacactccttcaactactgagccatctatctattcagctcctgtaaaacttttttttttttaattgagtcagagctggaaaggtagctcagcaggtaagagtatctgctgggcagtcatgaagacctgagttcatatcttaacactcatttcaaaagctgcacatggccatctacacctgtaactctagttctgtgtaagtgctgtgaggagggtggagacaggaagtgggtggagacaggaggacaaggggagactggaggccagtagagacaggaagtaactggagacaggtgagtagagacaggagggggtgaagacaggagggggctggagacaggaggggctatagacaggaagggggtggagacaggaggggtggaaacaggagggggctggagacaggagggttggagacagaaaggggtggagacaagagggggtggagacagggggctggtagagacaggaggtgggtagagacaggaggggggtggagacaggagggaggtggagataggaaggggcggagaaaagtggggtggagacaggaggggagtggagacaggagggggctggagacaggaagtgactagagacaggagatgagtggagacaggaggtgggtggagacaggagggggtggagacaagagtggtggagatagaaggggctggagacaggaggtgggtggagacaggaagcactctgggacagggaggctgcctgtcaagctccaggttcagtgaaagacactgaatgaaaggaatgagacagagttatagagcaggacacccaatatcctcctcgggctcacacacacacattcacacacatacatacacacaccatgtatattccacattcacaagcatgtgtacatcacattcacacaaacatgcacacgtgtacatacatacatacacatgtacgcatatcatccttatacaacttcacactcacattcatggacacacacgtgctcatgtgcacatacgccatatacatacacacatattcacacgcacacatatcatgcgtagtccacattcacacaccatgtgcacaccacattcacataaacatatacatacatgtgtacaggcatatacacaatatacacatatcatccgtgtataacttcacatacacatacatggacatacatgtgctcatgtgcacatacaccatatacatacacacatattcacatacacataacataccagaagtactccacatttatgcaccatgtgtgcaccacattcacagaaacatatgcacacacatacacatacatatacacacatccatgcatatcatccatatacaacttcacacacatgcatccacacacatgtgctcatgtgcacatacacaaaacacacacacacacacacaccacattcattcacacacacagaaagagagagagaataaagtcatgacacttagttttcaactgttatttcctaaaaccataaatccaaactgctgtgtacatagaaggtgcctggaggaatcttgtacagtgggttttaagaaatacaagctgaaaacaaaaatccaatcattttccacaagtgtctattattggccctcttgtaccctggcctcattaaaagccataggggccatttcagccacaatgtaatagggccacaaagaccatgggatttggaggatctagtaaaacctagctatgaccctcagctttgccacaaatgaattcattgtaagcaagacacttacaggccattatctcctgctggctacagtgaaagctgccttgccctgtccgacttaccttacagaggatcacaagcagatgaggaaaactttgcacattttacaggaagatattattagacacggcaatgcctacctatatccaacaatgaagccgttcagtatactggctgattccatgaaaaatttatttataatgcaaagtgacgaaactttgtgatatgattttatttcaactaatatattctatgatttgtatcactgtatcacagtgtccttaaaattgcatgacctgtgcttcacattatcagtggttccctgtgacaacttctgttgctcactgtgctcttgttcctggacttctggccttccattgtgtttggagtctcattcttacagaggtatttgtctcagctgtctggtgggtctctgctgcctgagcacctacctctatctgctgcagcctgcccaacatcatgggggcggacagacatggcgaggcttggtgcctgagggacatggtggcacattctcttcagtagagccacctggtctttgtagctacaggaaacactgctctgcagactcatcacacacaatgatgtccagtggcacaccattcagatgaacttattctcacaagcaactggttcagaggctgtgatgcggagtgcatgctggtcctaccatgcccctgccagctgatctctcctttctccatgtgggggaactattgaagagctctacttacccaaagcctttcccttagggagtatccaggtgattcaatctgcttcctttttttcaaaaagacttcatttctctaagaaaaatttactcctggctttgatttggtaagggagatggtaagttcagtccagccagaaaacgaacaaccaaaaacaacaatctaagagttattactatgcaatcagtttagtcagtcataattcacttgctggttataaacacatggtttttattgtgcttttggcatggtattaggaatggaacttgggccttctgcatgctaggtaagcactctaccactgagctaaatcttcagccatgagagcaaatgattttgatcagaaattcaaatacagcaaaatgtatccaaagataagtagagaatcctccctaccccttccagccctactccttgaagattacacagtcaacagttttccttgtgcccagaagttgaccatgcaccagtatgcccatggacattcttatttcaacttagcaatatgacttgaaaatccttaacaacacatgtaggtatgctaaattattttctatagctatataataacttacatgattacatcgtaacccatataattggtctcctgttgagtgacacacagattattcatcacatggattatttttcttctactatctgaaataatgtaacagtgaactattttattcataccactatgtgtagatgtgcaaataaaaccgaggacaaatcaccaaaattaggacttgcaagatatgcatatttcaatttgcatagtattagccaatgataccaacttcctgcatatcagcatgtgtgaatgcctgtgtcttcacacccttatccattctgtcaatttgtacattttctatcatcagtctggtcagtgagaaaccggtctgcaattgggatttgcatttcttgaattatgaatgagatcaagtattcttgtatgcataaaatagagattttcccctctgaactgatttttcaaagcctttgctcattttgctaggccacttgtatatttttgtcagtctagaacaatctttaatatatacctgaccatacaatgcacacatagtatacatgtgtaaaacttggttcaatctcttttaaatatacttggagacagacatttgcattcatggatcatctttttgtctttgcctttaattgctgtatttttttcctggaggaggtttaaggtttaaagcagatttacatggctcttttgttgttaatacctattcaggtggtttcttgcttgaaaaaagatcaagatcttttttcttgatccccctccaaaaaaaaaaaaaaacttcccatgatatcttatgaaaattttacagtttttcattttatttttaaagctttagtatatccaaaatgcattttagtgtgaggagagagatagagatccaatttttttcctaaatggctgaaaacgttgactcagtgccatcttctaaacaatccatctttctttactgatttaaaataccacttttatcatatactagattccctgaagtatttggacctacttaagattctgttctgttccattgatctgtctgcctatgcagatattttagaagcaaatacatttatggagctgtaatttagcatatgtgggtttatttccaggcttcagttatttgtattctacagaatgtttgtttgtcattgtgtaccttgggcttgacttcttcaagggcaaggattatggatcctatgccttctgtaactccctgaaatgctagtctctgccaagtttgatattttggaaactgaaattgagccatgtctttctacaaagccagggatagtctgagtggtttcagcagattggacctctctcaaggtattcagcccccagatacaatactaccacaattaactcttttcatcaaagatactctcctaataagatatgaatatgatgcattcttctaaaaatgcattcattattatttctgcttggcataagttttggtggaaatgtgagctggcttttagagagctgggcaatctggcaccaagacacattccatctcttttagtatcacaacacagcctccaaaatcgtgcctattagtctcacttttcagaggagaaaaggctcaggcaagtaagttaggatggcaggttggaaagaggcagagcctgtattcaaatagaagtttacctggtctcaaataccctcctcctcttgctctcctatgctgggggtagagacaaagatcctcaagccagaacaggaaatcatttccccttccggtgccagccctgcagtgactgccccgacagctagatgaagaataatttctccccacaccagttgctcagtgggaagaagggccatgataaatgttccatttctgccacagaagtcagggcaacagtagctgttgtcttcttaatagtgaagcagatccaaaaagatcttaccagcttcacagctgtgttcagtagttgtccaaaatatcaataagtaaaattcatctctcaagccctaaaaagccagaatttaaaaataaattttgaaaaatatagtaagtaaaagagggtagtatgtattattcccaaagttcactacaactgctggcttggcatgtcgcatgttcaacactacttcgcacaactgtgtcctggctctgctagtttgaagaaggctgtctcaaactagttttcttgtacacagaagaaagaaaaggaatactaggctggaccacttgtggtatgtattaaacccttcttgcttacatccctaaattagaactagaggtcaaattatgtaacaaagacttgagtcaaattctgcacacatctgtcaattccaagaatccaacccccagtgtataggatgatcagtaactccaggagcagcctctggcttttctaaaggagcaagtaaaggtaggcattcagcttctcgttctcttcctctccctcagaaatctacagatctaattaagtattcggagctactccccagtgtcatgtcactcgggaaccatcagcctcactcctgcttctgacagcccagacaaaaagccatgctctctgtcagaaaaaaaaaatgtcaccagtgggacagtaggcagaggtttgtccaggcatagatcaagttcttccttgtccctctggaacagcacaaaaatcttttatttttatgtctagcttgccacgagaccaagaaccacagccataaccccttccagcctttagagcagtggttctcaacctctgggttgtgacccctttggggacgaatgaccctttcacaggggctttctaagaccataagaaaacacatatatttacattaagtttcataatactataaaaatcatggttatgaagtagcaatgaaaataattttgtggttgacagtcaccccaacatgagaaactgtattaaaggttctcagcattaagaaggttgagaaccactgcactagaggaggagccaaaagaaatcccactctggggaagtgacccaggacacagctatgatgaccacatggttctaaactagagctgtcaagtcaacaaatgatgtgttcactcatacactttaccagagtctctgagaagatcagtctttggacattttgctatgtctcctagaagccatttgactactaaaagggcattgtaggaattaagaacatagttctaatcctggcccagacactcagttcctgtgtgacttctccatgccttagatgtttcatgtgtgaactggaagaaattgtcacatgccagctgttcagaatgcctagaactgaagctggtatagaattcctactgttattgcattaaattgtctcagcacctagctcccaactgtccctctttcaacagtgttccagtagcacggttcttgcatctatttggaccatcacctataattccaactctgaatctaatcttcaaatcattccaaacccagctgacctttttcacatctggctattgttatcagattttcctgtgtaacaatcttagagataatacagccaacacacatgtgtagcctaaagaaatccaagcccattgcttgaagagttcttatgattttaatctggttaccttggtacgaaactacttaaatgtctctccttgctggcttaatgaataaagaaaatgaaaagtaatttctactccttttggttttgtttcttcataggaaatcaccttgctgtaggaatcatcccttcgtatcttgccccagctgtttaattcatttggcataacattttttttgtctttactatgagctggtagacagaatttcaaaaggaacctgatgagggacgatttcaaatatcttctttcacttttcctttctcctagcaaatgaagttgcagagtccttgtgccatttaatgtggcagttgggtgcatggaacaactcttttaagatcacatacctatggctcttttccacagccctgcttcagtttgtctgccacttgtcatgcagcctcactgggaactgtgccatgttccactatcattttctgctttatataaaaagaagaagaagtgagagatcaggattgttagattctataaacacttgaatgcctgggaaatgcagagccatgagccaggctgctggtgacaaggagcagagtggggagaaaggaaattacatcctaaactccaacgcatactattcttacatgatgtctaaagagacaggaactcaagttgagcatttgaatgttaaaacaaaatagacaaagcaatgctcgcccagcaaaatagctgtcagatatgtgttctcctgaatggaaagggaaagaaaaaaaaggagaaacagagataaaaggcaacatgggggaagaaggagacagattgtctagggagggtatagttaagactcctagagttttgcatgaaatgtaattttgttccataaagggatttaaaatgagggagagaggaaagagtcgggctcaacttcacaagctgtgattccctgacataatatttcctcatctgattccaacagttccaggtagccaattcagtgctgtgcaattctgaaaatcacccattaggccgaaatctaatctcaggagcatccaaactcccaggtccaaagctgggaacattgttgccatttttatttttcctttacctgctccacagttccaagacaaattaacagaatgagattttattgtgtgggctgcattgttcttttctcctgtggtacgagtaacctttccccacctgcatggagacgcagaggtctgttccatatgctttttgttatttttctgcttgttggcaaaatgaattgctgcagagaaatcagggctgtagagacttgagagcaggtgactgagtctggcttcctctgtgctgttctgtcactttgtgctaccaaagccccacactagtgcaggtcacagactttacactgtgaccacaagcccttggacaggaagaaaactgattgtgagacatatgggattttaggggaacctcaaaagccaactgatgttctctgaacccacggagaaaacccctagttggagtcatcagatttaacaattctctgaggaagattcagaagcaaaatcagggcaaaattgtatttcttaaaatttcttttgcctctttcatgcacgctaacacaggaaggtaaattgcatcgtctgtttaaggtgtctgcaacattattgattatatcatagccaacaaacaactcgtgcatttttaaaacctgtgggttttcagtctccctaactgagctctaaacacaaaggagaaattaagcaaaattattattaaattgaaggacaatgaattttaaaaaataagctggcctgggtatatagctcagtatattctcaatgccaccagaagggaaggcgagggaagagttcatacagaggctcaaataaccaagaggcggtggacagcatcaattcttcatgagtttcatgctatcaccaagcacctcttcagaaccagtggctgctctatgtggcttatgaatcttttcattccctcaggacttgctctcttgtgaggtagaattacttaagtagatcgggcaaggtggctcagtgggtaattctgatgacaaacatttggttcccagagcccaggtgttggaagtagaacaagaactgagtcctcctgcaagctgtcctctgacttccatacatacactatggcccatatgtgcccacacaataaataaacgtaataatttttaaaagaaattcttaaaagtaaacttatttatgaaactatatcctgtatctacaaatgaccaagataagacatgtttcataccagctgcagtaagggaggggtatgaagacaggtgtgagtgagtcatgacattttcacatgactgctttcagagcagtggggctctattcatgaaatgggctttgttacttttgtaagtccgtttacaaaatccatctgcattagttactttagaatcactgcagaaaatacctggcagggacaacttaagggaggagagatctactttggctcatagcatcaggggatttccctgcattgaggcaaggaaggtggaaagtgtgtggtgggagtatgtggtggagggccttcatatcacagaacatcaggtagcaggaaccaagggctttcaagaacctttcaaagaccagctcagaatgatgtatttctgccagctagtccccacctccagatgatccacggctttccaaaatagagacagtacaatagtgaaggaacagcctccccaacatgagcctgtgggaaggaacatttcgcatttctatcttcgtgccattttcaaactaagaatttacttgaaccattaatagaggttttctatttttggtagattaagagatttttttcttaatcttcattttcttgttcttgttaagtactgtcaggtttcagtcttcagatgatttttgtaaataatgaaataaactgcaatctaataatcaactcattgaagaacaacttttcaaaaagacaatacagcttaaaataaattgtcaccttccacacagctccatggggcaacagatggctctcttttcagataataaaacagaagtccgaatttaataatggaaaaccaattaagaaaggtgaaatgtaaagaaataaaagtgggtggggatgaggttgagtttaaagaaatcttcatacagtgtgcatgctgggctgctgccatactggatgctatagccttctgttgggacctattattgctctctccgaaagacaggggtctgagcttctgagagaggcccacaggggacactgacaacatctaccttagatagtttcactcaaagggtaagaatgataagatgtactcatctgtcagagccaagtggcagggaacttgaagaccagaagattggtcttttctctctcatgcccatgattgatccaaggaaattacatggatggagactagtaaagtgaagtaggtggtacactttagaggtggctcacagaagccaccctgccaccgtagatcatggtacccttccaacctctcttcatgcctgtgaagttcgctttccttacctctcaagcatgacaggatggatgcatgaaagtgatcttatgcaaagaaaatactcttgaggagagacaccgaaagcaccccatgtgggctcctgaagctactgaataaacaagcttgtgtcattcctagcaagtgacaaaacgccgtatcctggtgagagtaaaattaatccaaccatcagtgtatcgtttgcttaccacccgggagcacaagcaagaataatattaagttaacattaaaatttatgagcaaattactctaaaacacagcaaagtaggcgttatctgtgaatatagaaatttaagatatcctttgagacacagaatttaatttttgataaactctggtttcatttttcatatctttggtttggttttgaaagcatattaatttctcattatcttgtatattttcttaatcaaatttattttagtagaaatactagttatgaatctatgattttgtctattcatatcatttgatcagctatgagttaacttaaagtatttgaaagataaatttactacccaagaagtaataccttgttttcctaaatccttaatattttcacagtgtgatctcccatagctatggtgtcaccttcctgactttcacaggcttatatgaggcattttctgtcttagtgggctggggagttcaaaatgcagccatccttgcatttcatgtacgtcaccttctctcaacaccataaacaatatgcaaagatcaataataatttcatatctgctactagcttggtgccatgttatagcaaagagttgatttgtatggatcctaattttcttctgtttcttcagaaaattggccagtaatttttacagtcttttgtccttagatgaaatttcactcagagttcttgatgaatagataggattgaggatatcaaaacacattttactccagtccatttcaataatgtcatacttgaccagggacagttaatttgttaaggatcatatttaactttcaaaaatataactgatactttaataagtagcatttgttattaactactaacagttagttattgactaatgtaaacatagtcagaggaaagccaggtggggctgtgaatgcttataatggcactgctggggaagaagagatggaccagccattctaacccatttgttgagttctagattagtggaaaaccaagttttaaaaaacaaaacaaggtacacagcatcaaaagaataactgaggttgtcttctatcatatacatgcatgcacacaaatgtgcactcacacccatatatacaagtacacctacacacacacatacacacacacacacacacacacacacacacaaaggaaatagtcagaaggttcaaatctacctgttgtactatacaatagccatctccagaacatgagctgtggctctcagagtttctgactcagcactatgtaaagccattagagtttgtgtgtggtgggggcaagttacactgcaaaaccaaaccgtttcccctgtgggttgtaaacataagatttgcatcagcttcagagcatgtgaccatcacaaacctgccagaatttccatatgcattcatgctcagaatcatcactgaagcatggaaagaagagctgataaaccaagtattgaaggcccttgaagaagtcagacccttgattgtccctgcctagccccacatgcttcattagccaaggcaagatgcatggcattgatgaggtttgtatgcaaagaagagtaccattattccatgtgttgaatgctagaaggcactggtggtaccatggctcccactcacatagcccttgaggaatgaagtaagaaggcagaggtttgaaaagctcactcaaaaaatacccaaatacttttcaaagaaattaattctattcttttgtatctcaggctatcatcagtgaggggacaaagtcacagctctccactgccaccctcagcatcttgaggggttcctttaatcatttagggatcttgatctaaacaaactgagattcattgctctggtgcagaaaagaatttcaagactaatcagctgagttggggttttattaaaaataaaaaggaaactgcttgcaaaaagagtaaagaaacatgacagcataagcatgggcttcttaagagagagcccagtgtagtaatcaacaccatgaccagaaagcaagctggggaggaaagggcttatttggcttatacttccatattgccgttctcatcaaaggaagtcaggggcaggaactcaaacagcaaaaacctggaggcaagagctgatgcagaggggtgcttcttcctctggcttgctcaatacaagcttgctcaggacccccagcccagggatagcatcacccacaatgggctgagccctcccccatcaatcaccaattaagaaaatgccttagagccagatcttatgcagacatcccctgtgcatccatcctttcatataacattagcttgtgtcaggttgacataagactgagccagcacaattgctaaggcagacttttaagagcagagggctcacagaaaagaaaagatcaaagcatacccaaaatctggacttctcaggggataacagcaattaagtatcttagcatccatcatttgggtgtctagggttacaaatttcattgtttccctctttttgatatgtgagattataaagtgccccagagataccttggaaggattataatctggtaaggtaaaacccaggaaccactggtgttgcacaagggatttagtgcatgccttctgctgtggttgaggattctggtgaggttccttgttgggggtctttagctgggaagggagaaaggccttaagtagttggtaattgtgcctaaatgcttgcttctcagctgctggaaggcttagctagacttctaggtaagtgttcctttgtcttcccacattgccataaattttcctgtctttctattctgcctcaggaccaaaagaaagaggtatgcatcaacagaggtctacctctcttcttcgcatcactcacgtttcacgtgtaaatgcaagtatccaatggagaacacccttccttcctctagcattttcacattatgaattgcagcatctaccagtaaaattaaggagatgttagcttagatttaagatcgttagactgaaatacatggtggctctcatttacttgggttctgggtagattctgattcttcatggcctatagaaatcatcacacaatcttcatagtaactatgtgaagcatggatactgagacccaaggactgaatgaggaaagggaagaagagtaaagaattgattagtgaaagaagatggattccggctactccctaggcctgctccctgagctgcagcccctcagagatgactgtgtctcccacatacgctgatcttggcaagtcggccaaggatgttttcaccaggggctacagctttggcataataaaacttgatttgaaaacaaagtctgagaatggataggaatttaccagctcaggctccaccaatacagagaccaccaaagtgaacggcagcctggaaaccaagttcagatggaccgaatatgggctgacatttacagtgaagtgaaacacagacaacacccctagataccgagattaccgtggaagaccagctcccctgtgtactgaagctgacctttgactcatccttctcgtctaacattgggggaaaatgctacaatcaagacagggtacaagagggagcatatcaacctgggctgtgatgtggactttgacattgctgggccctcaatccggggtgctctgatgcttagccatgaaggctgctggctagctaccagatgaattttgagacctcgaagtctcaagtgacccagagcaactttgcagttgggtacaagatgggtgagttccagcttcatactaatgtgaacgatgggacagagtttggtgcctccatttaccaggagctgaacaacaagttggagactgctgtcaatcttgcctggacagcaggaaacagtgacattcgctttggaatagcagccaagtaccaggtcgaccctgttgcctgcttttcggccaaagtcaacaactctagcctgatcggtttagggtccactcagaccctaaagccaggtatcaaactgacgctgtcagctctgctggatggcaagaatggcaatgcgggtggccacaagcttggtctaggactggaatttcaaccataaatgaatattgtaccaacgttaattttaaactatttcacagtataactaccttcagaatttagtgtaccttttaatgttacatgttggagatgcaaaaattgataaataccacattagatgtccaggctaaggatgactcggctttaaggtgtttaccattttagaggtgcagcagaaatcccattcctaaaagggtccttttagctgtagatgtgggttggggaagtgccactccagagacgtcaggctgcaagcagaagctgggaatgtgtgggccctttgtaaatctgtgtcaagtccacagatgaaattgtgacttcctgagcattaaatcttggtgtcccaataataactgctgagaagcatgtacacacctgtgtgaaagggactttttaagacagaccaccatgtcctgttcccatcctagcccatcagtttcctgttttacaccaaaagtactattagctatctcttttgtgccattttagggtggagaggttgggcatgatggagccagtcattcaggacttaatttttccttgtggtatggttttcttttccttctatacttcttgccttccttcctttctctctttcttctttcaattctctctctctctttctctctctctcactctctttctctctcccttccttttttttctttgccattacaccagagtatgaaacagcttccaggatctccagctttaagctgggcaggtgtgttataggcctcaccactctatttttttagcagtttaatgggtacattatagagtctttcatttcgtgtagaattagctactcctcttcaaatgctgtaattaatatcacttaaaataaaacttgcaataaaatattgaaacctcaaaagaagggggaggaggaggaggaatccaactccgacctgcaaagcattcctcctgaggagcataccacaatgaacaacactgatgaaatatcttaccaagcgatgtcatttattgtgcctctgagtaccagttcatagctgtgatcccaacaaaagagttctaaacagtgttctggcacagccttctccccatctccccccccccaaaaaggtggcttttagttgtgccacattcctgccacacaacaaataggatttataaggaccatttccggggccgctttacaaactttgcatggctttagactaattacagatttaaaatattagcacaaatgaataagactggaagattttgagtcttacacagggaatattaatagtactcagagctgctacttcataactttggagtgacattcttggaggtcaaggaaatgccaccacctggagttgtgcactacacaatatgtgtgaccatatgctggggccctgaatttcttatgggcagtctgccttcacctgcactcctatcttgagatgcttcatcttgacaggtttctgttttggtcttcattcttcaaatacccttcaaataattaataccttaaattcttccttggcagttagtagaggattttgccatactggacatgcttagtattgtgaaaccaaccttaaaggaggatgctccatccatgtctctgtttgcaaagagtctcatggcctgcatctacatatgcaaataataataactgatcagagggcctaaaaaatagctgagtttattggagtgtaaaacaatgactaattgatataactacttaaaattttcttagcaatacattctgcatcttggagcataggattcacgtgtttactgatatttcaagaatgaaacaaagaaacaccacttcaatcagcagctgcaacagcttcctccccgcatctccagtaaactgctgagtctttcctcccctcccacagggccctaggggacccctctccactagtgccattgtctcttggttttattttaatcatattttcagtcccccaacccattccaatgtcagcaaagactgttgatcttcacaagtccttgctgtgaatcccgctgagccacttgggcagataactgctctctttgaaggcctgccccaatggtctctgtgctggctgtctcactgaagaaataaagcagcatgccttagggaagattcttcagtgtccttcctagccatgtttgtgcacgttagtcatcctagccactcagtggacctatgaggcttgcagctctgtgagagctgtggtagacactaagaatattccacaatccttttcattcttctgaaccaagccctcaaaagaaatgacttgtggacaaatatggattcctttttcttccccaaagataaactattatgtatgaaaggacagctaaacatgaaattgcaaggtttccactgtcaaataaggacaggcggtagagaaggaagaccacacttctctacctcaggacacaagggtgagggaacaaatcaggaatgcaacacctcagacccttccagtcagtcttccctaagcaactaatgctaatataaaccgggtgatttgggaatagtctttctggctgcagagagtgcagcatttactattgtaagatgtctgctattggcaggagctatcagagggttttccttcattttcaactgtataataattatgtgtttgaggtatagaatgaatgtaacactttcatagaaaaaatgcacattatgaaatgatcaaatcgggataataaacatatctgtcacttcaaatgtttctcgtctttgtgataagatcattttaaatactattcttagactatttgaagtatataatgtattgtggattccagattcatgcctggggtccttgttacaatgaggctgactccttggtccaggaaggcatacttttgctttgcgggatggtgggggcctgctgtttgtttcttcatttttcttgagatagggcctcattgtatagtccaaactggctagaattcccgtttcttcctatgacgcccatctgaggaaatgaagaggtattcatccaccaggacagcttgtggatgatttagcttaataatgtatagctaaagagcttctagtctaatggtgttaattctgcaccttagagaccacagctcaagggacaaacatgcaggacacttattacttgtgacaaatggtggcatcttcaaacagcatttccaaaacctctcatctgcattgcctgcctcgaaaaataaggaagggttaagaagcccatcccatgcccagtgacttcattcgatcaagaggaaattccaccccctcgagacagggatggaagccggcactggaaaccagtattccacaggctcagctgtctcagtggctctgtgcgtgggttctgggtttggtttttacattaccagcctcagtgaggtggaacagaggattacaaaaggataagctaaatggcaattgctagtgcattgttgtggtcaccagcaccttttccaacagtatttttcatttcttcaaagctatatggagcagctaatctatttatgtgctttcttaagagaaaaaaatggataatacctaaggggcaagtgtagtacaagttaagaataacattttcttttatccccaagactccagaatgctcacagatcttactattatcataaagataaatgacagggggatttagtccagtgagaaatcacccagctattggccatatacagcaatttaaaataaaacacaccaatctctagcctccagccccttgcagtctttagcactgacataaaagtccaatatgaaagtgggtgttggttcatgattcaaagagatgcttattttaatggtgatcgtgaccaaagacttaggaaaagggggaattctaatctggggcataaaacaatagatttatgctcagatgttttgttcctttggagaatgtttcaataaccttatagaaattcatccaagtgagctctctgctctgcccatgagtaggtgtcatcagaaaaggttaaagaaagaagagagtgagggaaggagggagggagggagggagctctctgatgtttaatccattctcaagtgttcagtcctaaacatgtacattagaagaacattagaaggacacaaaatagactcagtagggtgtgtgtgtgtgtgtgtgtgtgtgtgtctgtgtctgtgtctgtgtgtgtctgtgtatgtctgtgtgtgtgtgcgtgtgtgtgtgtctttgtgtatgtctgtgtgtctatgtgcctgagtaaaaagaatgaaaaagaagaggttataaattggaggggataacaggaacacggagagagctggaggggagatcttcctgcctctgcctcactagcattggattagaggcatgtgccaccacatggtgacatccagatatttttgatgtgactccaatgatcctcagaatgcttgttcaaaccaagtctgtgtcaacacatgtggaaagagtacctgtgtaaagcagaggcaaactgaaataaatattgctttgcaaccatgattttccagtggtgtactggattgagatggtgatcccctgtttttcagcttctgaagtgtgccctgtgctccagcaactaaaggagctgtttcttgccattttggaatgcaaacctcacagagcgtgtgtcagaccgaccttttcctgccttctgttcttgatcctgttgcatacttatgtgttcttccaaaagaaaagaaaggttaaagactgaaatcactcagcccagataaagtaaaaagagaaataaaattaatttgtcctttaagtaactaattgcaaccgccttaagatttcagaatcataactttacatattagtatcccatgagctaggccatttctaggtgcagaggacaaaaggcaagcaagataaagtctccagctccatggaacttactctgtaaggaagacagtaatgaaacaaaacaagcatgagactataatacagtcttatatgctaataaatgttataaggaagaataagcctgtacaggggatggagggaaaagtcaagagcacagccatagtaggtctatctgagagaaggttcacagaacgcatactcacatgaaggaggacaataaacctcacagatatgaagaggccgagctccccaagcagtgagaacaaaatgcatacagggagctcaagcttgatgtttatgaagaacatgaataatctatgtgacagaaccaatgacaagagaaatagacactgagactctatagacaggaagaggtaagagcatgtgaggccggtgggcggggtgggagggcatagtaagacgctatgttgtcattctagttcagccattggaggataaacaagagtaacaagtcatttcattcacatcttaaactgcagagctcttgacatgggaagaggcaagatcaaaagcagagtgacgggctagaagtctgagggaggtcttgaaccagtcgagtaacaataattaaggtgaagttgatcagttctgtccatgtttatgaactggaaatgatgaggttctgatataatgtcaagaggtttgtgaattggagggccccaaggggtcacacccagctttcagtgggaatcctgtgatcaatagtactgtttgcagaaatggtaggaagaaaaatctagggaagaggaaccaagaactttgtgttcaccctgccaaattcagaagtgttctttacgtttctcatagagatgttggggggggggtgttcaatgtatatgcctggagccgataaaagagaagagatagaattgtctagaattatccagaaacacacaagaggtaaaaacccagagtgcctaacaaaatcacctgtagaaagagtgaaaaaaaagaaagaaaaccatgaaactttaccttacagtaaccccaactctctaagtcagaattaagagtgcccatcagagaagaaggggaaggccaaccagtgcttgggaagaaaaagaagcacgacagagttacatttgccaagtgaaaaatgagcttccgggaggtggaaggagtggccagctatttgttcctaacataccctgcaagatcaatactaatgttctctagatgtggcaagatgttagccattagaaagcttgacaaagatttctgtagcagagagacttaagtacagtggggccaggaatgcagatgagacacccctctcccaagagggacagaaggtaaccaaaaatagcaagtaaattctgttccaggggagcttttaacatactttcaaattctcccagcagtagtaattccatggaggaaataacgatgcttgagaaaggatgcctaactgcaggggtgaagtctttgaggagtagagaagtggtggcatctatcacaggtgagcagagctgggtgactaaagaaacaggactccccatccactgaaacaaagacaagaccaagggtctggattactgtggatggatttgccatgaactgttctttttggtttatctgtaattttagtgacatttgagacaagaccatctgcatggacagaaagggtattagatgctggaggaacaggacaaggttaggtctctaagagcagagctgcgagctgtccagggaactctgagtgctgtctggcagtgcagacagcttgcttggagatctgtgaacaaagtcggatgactctcattctccaattgcttcaccagtgttgaaaaggatctaatatttacaggaagaagatttttgcctatacggaatcttcagagaatgaaactaaatagagtggaagtgatattgtaaaagacaaatatatgtgaatagaaggataataaaaaacataattgtccttattcttatttcctatccttaaaaattagccctattaaatttagaggatgatggaggattccttcagtataagggggtcattctctgccattagaaaattgtacattcttaaccagttatttagaagtgctgtaacagagatgcaggctatcaccccactattattaacaagcaccattgactcttaccttgtagaattaagactccattccccaaattcttttccagctagctgtggccacagaacaaatcacatgtcaaatgagttggaaggaaaagtaaattaacacaatttctggaaatttctcttaaggatgtcgactccttaccttccctaggaggtaaaccccttaccagaagatgggttgaattctagccaccatcatgaaccatcctaagaaaggcagtttgaattcctagaaaggttatagaacctccacaatctaaaaagcaaaaatctgggctcacgagagtgaaccacaatggtgcccatcaaaccacctggagactgatgtcctttaacagtcttaactttgttctttatactaaagctattggcaaattttcagttcaagtacacaatccttatttacattgtctctaattctcagttcattgcagtagttacgggaactaagtccacaacttcttactctaattgtgatcgagtactgtctagtgttcccacaagaccaataaccaggattctgagtctactcatcacttacatttccaacatgatatctgatctgcagggctagcaacacaagtcaaggtataggcctggcctgtcaagacaaggattatcacagagcactttctctgaaccactggacattgacttcccaaataccaccaatgttcatagtctgctttgctgtggaatgttagtttaagatgtgttatatttgtttatgctgtggaatatttatttaacaatgcatagatgtgttgcattcttttatgttgcatttgtttaactctgtgaagctttctatgatactttgcctgtctaaaacacctgactggtctaataaagaactgaatggccaataatagctaggcaggagacagggataggtggagttgccaggcagagagaataaatagaagaatggaagaggaaagagcaagaaaatgaggagaagaagacaccagcggtcagccacacagtcagccagccactaagtaagaaggaaagaaagatatacagaatacggagaggtaaaaagcccagaggcaaaacatagttagagagaaacaggataataaagctaagttagaaaagctggctagaaacaagccaacctaaaaccaagcatccataagtaaaaataagtctctgtgtatttatttgggagctgcatggtgggcctccaaaagagttaaaaaaagaaaagaaaaagaaacaaccaacaacactcctctccaaggggaaaaaaaccagatttgaagatggaggtttctctggaaatatacttaccaaagggtgtgctttggggggaggcatttttcaataatgaaattgtgtctacacacagattcattcattaactagaagtccatccattttagattctaaaatgccaccacaatacaggacacaggcaacatgccagacaaaaacaattatatgcaacaagttatgtaatctatgacctttaggaaataaaatattgaacttatattgtttgataatttataagtaacttttatacttttacacattttattactattaaaccaaaatagaatgttctcccttatgttatcatttattaaaaatctctctggatttccaggcagtttaacaaaatgtacttcgtagggagctcaaaaaacttacataatattttagcagatttctctttaaaacaaaaccaaaaacagttgtgttttctagagtctataccaatagcattaagccaagagaaacttttggagaagccagtaatgtctctgcattttcatttgatctctctctggatttaataccctcatgaaccctgaatggaatatatgcatgtcacagcatggcagagggataatacattttcccctgcttcactgagcatgagttgtgtatcttgccatcttgagagtccactgtgcggcacatttatccccattagaaaagcatggttggataatatatggatgctgcagccattcatgacaaatacgtaaaaccataccttatgcatccagggatccgtgtatatacactgaagctattaactatgcatcaacaggattttgtaaaaaacaggttttcaactccaaagactaaaaggacaaatgtattgattacttttgcacatttattcagcttcaaaggtagcaatattaattccaagaaagaaaagaagagggcttgccacattggccatgtgacttaatgttgctcaccttaaataaaatgctacttactcgagggtatgcatctataagtacatcttgaataatttatgaatatatatagctccttctttttattttattgtgtgtgtgtgtgtgtgtgtgtgtgtgtgtgtgtgtgtgtgtgtgtgtgtgtgtgtgtatgtatgcacaggtgtttaaagagacaccagaagagaatgctggacctggagttacaggtagctgtgagctgtcatctgatgtgggtgcttaaccactgagccacctctccagcccctgttccttctacctttacttcagagacatatcacaatggaatagcacatttataaaagtaattcccaaataagcaaatgcatattcttcaaaccccaacatttactggttgtatattctttagcaaaattatttatccaaagcttcagttttctgtaaaatgaaagtaataatacttgtcttgtaggattttctacagaatactctagatcctggggtgggaggagcatataatatgtagcactcaggatatcattggcactcaacaaatattggcagttttcaccaaccttcatgaaaaccctgcccaccatgccaatgggacagagggagtatatataatacataggatttcattaaccatatactccagccacttaggtcagttctcaaggtgaaatctggtgttgtccctatatacaatgagaaaggattcacatgacacagagaagcaaacaaagacctgaaaagcctaacagaagtctttcctatagccagaattataaatgcccaaattcacatctgtgtctgtgcctattgtgtacatagaaaacaactatgcacaatgtcacaacaaaggaaataatggccagagtcaagaaacatcatggttagttctctctctctctctctctctctctctctctctctctctctctctctctctctctctcctttgtaaccagaaatttcagaattcaaatctttccaaactcaagtgtaaggtttttttagaaaaaaaaatagtgaaaaaaaatttgccattcttagagttgctgagctcattcctcaaattctttggctttagagttaagtgctccgacattgaaaaataacggtttactttttccataaaattaagaattcaaatacattactggtgttaaactctcatagatatgcttaatatacttgcttctccaattaaaacaacacggtcattaatatactgtattatgttatgaaatcataattgcagccaagcagaaaataattaccatctatcagccttcatggtttacaaaagcaaaattatttttcctttgttttagaagtttcacaagacaaatactagttttatagtggcaaccctcttacttaatattacccactgtcatgtgtatctgtaaactgtcctctgtccttctgggcccaacttacattgagatgatttaattttaaaatctaatcccagggcaaatccttctgattctattgtgaacacctggtatggaaaaacactgggcttctttcaaatgtatctccatgtgaaaacaagtgatttcacacatctcccagaccagagctaaaacactactgcttgcaattactttatatcaataaacctataataaacacacactgtagctggctttgttgggcaatgtgtcctcaaggccttaccctcaagctgcatatagatggctggacaacactatgaggaaagggcacaaaatgaatacaacacaatggtagagtgaaaagggaatgaaagaaagataagtatctcaatgaagcttagggacaaaacagctcaagaatagcgaaatggatatattggcatcattgcaaggatgctatatatactgggagaatttcatttaacagacacagggctatgtgccttggaaacagtatgtgatatctgagaataaacaaggcatccagcttgcttgagtcatatacggactgttgtttctgctacccagaatccacttaccccactgctaaaaccagcctcgttttcttcagagacatattcctgtggcccatagcgtctaagtatacctgttcttgtctcaagagacctcaaagtgtatacttaactgcagtgacagttgggagtggatagacagcccactctaacccaccaggatcttcagggcagctcaagaaggcaactgttactttctcctgttaatgaaccaggaagtttgggactcttgggtctactaataagcagtttatgagggcaaagggactaagataaagcaaattcttcaattttagatctgtcagaagacaaactcatcttcttattccctcatttccccccaaaataaatcttttctttcatgtccttggaattctacatggtgctactatctacctagttcttcagattagaaagtatagtgtcagccatatttccccatgctttgtaaattcagttagtctagatcatcccagcaatgactatcttcttcccactatctctacaccactgactctggtttcacctgtgggttttggagtctgaagatcaagaattgaagttctgtaggctgactagccaggattcccattccctacttaaacatttattaatcccaggaacttcaacaaattatgtaatatacctaaccatttttccatctgcaaaatgagggtggttgtttatacttcatcaatgttgggatctcatgagtagagagtttagcaaagtgcaggccacatgctaagcaacaaagaaatcctatgactcctaaagcaaacatctgcttacccatctccttcactctcaactgccccaccttttttcatttctcagagatttctaaaccatgtcagttagctgtgtaatttgcatggctatttgttcctggtttatttcttcaagatgaactatggaatgaattggtctttccaggtatcttttatttaaagagaagagttggtttcaaagtagagcaactgtaattgagtcgggcagtatgatggatgagtgaacgtgggtagagagtgtctcctgatgcattaatacggacagtatgtcttattgtatctttgtaaacaagttgagagccatcagcctctgggaaaagcccaccctctcacacatttgcagccagctgacctcttgagcctttttccaagtcagtcattccacacgaaatctgtggcctacttatatcttctaaaaattggcgttccacatctccttgttttatttttgttttacttttaaagtaaaacaaacttttcctgaggtaagtaatatttataataaaatagtctcgttttaaacatacagtttgataattctggtaaatgtgtgcactcacacaactatttccacaactgaactatgaactattcccatcatccccaaatgcctacttgcactcacttctaggcagtccctgcccataaatccactttctattgctttgtccattctgagatctaatgtaaatgaactcacctagtgtgcactcctgtgtctggctccattcccacattacatgattcatccacactgttgggtgtatcactaacttgtttcttttttattcctgaggagaattagattatacagtgtagggaatgaatattcttatgtcacacaaagaaacacacaaccagaataaagttatccacaaaaaggatccagtgtccagaaccccaaccaagctagcaaacaggcatgcccaaaatggtctctatcttttatccctaacataggtggtgactgtgtctcatcctattgatggaaccacagcctcacaatctgacactactggctaatcaggaccaagaggaaggggtgggacccctatcagtctaactacactagataggataaaatagcacttctcacacatagctatacaagaacgtgtttttccacttccatattgagggacatttgattgattttctactttggacttttatgaataaagttgctaggagaatgtccacacacatctttatgtgggtgcatgttttcatttctgttgggtacatgtctaaagatagatactgagcattcaggaaagggcatgtttaatcccataatacactagaccaaaccattttccaaaatggctgtgctagtctgcatttggagaagcaatgtacaagggcatcagaaactttagttcatgggcatcaggtactcaatatttaaggctctttaatatcagtcattcagttggatgttcagaggaataactcacgtcttaatctgtgttttcatcatgtttgtcatgtcttcggtatccttagacattctttctttcttttacagaatatctgttcaaatcattagcatgtttagtagatcacttacctttaaataaataacagtttgactcttcctggtcatttttacatgaatccctatgcactggccaatctctctgtctctgtctgatgcatatttttcaaatttacttttcatttatgtatatgtgtgtatgcctgcataagtttatgtataccacatgcatacaggagcccacagaggccagaagaaggcatcaaattccctggaacaagagtgacagacagctgtaagtcacataggtgctgggaactgagcctggggcctgtgtgagatacataaggacacttaactgttgacccttctctccatccgcctgatacattcactaaaagcatagctcatggggacctcttttctatgaaaccttgccatacctccccaatcactcctttctctatgatcacactactgctccccctttccttcaatagtggcaattattcaagggtgtcataacttatatgtctctatgtcagtattgtatacatctctatatctcctagtatatgatctccttgagaacataggaagttttctttttctttaaatttgcccatggattaacatagtactcaacacatgtaagagaagagacatataaagtggcatataaagactgaagctattggagagagagtgtaggatcaggatactgagatgaatatccctgtctttatccactcttttcacagatgttcgctgatctccttttgtgacgaggcacctcagataccatcatacagacacataaaaaagctaagtcaacggtgaaacccacagaaacagctgacctgaacatcggggagctcttggtccccagattgatagctgggataccagcatgggactgatccagacactatgaacgtgggtttcaacgaggagacctcagaaatctatggaacctcctatagtagttcagtacttatccctagcataggtgtggactttgggcgcccattccacatagaggagtactacctgagccaagacacatgggggtggccataggccctatcccaaagtatatgatagactctgatggtcccctatggaaggcctcacctccctggggagcagaaaggatatgtgataggtagggttttagttggggggtgggaggaggaggggagggagatagaactgggattgacatgtaaaacaatcttgtttctaattcaaataaaaatgcagagaaaaataatcttatagttcaccattaaaatattattaaaatgaaaaaaaaaaaaagctaagctgaatctctgtccctgtagaatccagactatggtaatggagacatatataccagctaaaagttgaaatacactatagtgagtccagcatcccaggagactggggaagactggagaaagttctctaactcaagcttagaaatcagtctttctgaagaacaggggtctgaaatcacactgaagcgggcattgcaggttggccaagtcaggagctgccgatatcagttcaggcaaagggcagaggtaggaaagaatcagggttatccagggaaccacaggagtggacagagctagagagaggattgcaaaggcaaatgctgctgacagctccattaaaatggccaatggatccaaagggaagagtttttatgaactttaaatttccctgtagaagagattttggtcacctccatcataaagccacctctagcccctgctttgagtagtcttagcaaggaggaatgacctacacttgatcccttatttctatcatgagaagaatgtcaaaacataggtgtgagtaataagctaatgcaagtcagattttgtactcactgaacgtgttactcttgacagcaccagttaacctgtgctctgcaacaacctcccagacagacagaacacattactcagcagcagcaaccgactgtgagcccactaggtgtgtgtcacttctgcactgtggcagtaaggtgctactttcccatgagccccctcttttttctgctttagtgctttgaagtctttgaagtcctggtgggtgagccattccctctgagcaggaacaatacttcccagaaggaagagacaaagttgtaagatacaggaagatcacacaatttacaggactcaggatgctcaaaacattttgaaattcactgagcccctccctgagatataaagcaacaattactaaaggtgaaggagtctcttcagtacttgggtggacttttggtgaaggatcagtatttatgtcatccaggctctcataagaaacccttcacccatgttccttcttgaagtaactttaatgaactcattggttcaccaagatagagttagaggaaatccttaagtttgtcaatggtgccctgtgtgcagtctgtgcacatctccctggagcaagtcacaagcccatgcaatgacttcactggaggaaaacctgggtccctcgatgacttcatgtagcagaatcccgtggtaacttccacatgcttcatttacctcattgtcatgagttgtgcattgcagtgtagtaagacactgaagattagaagccatttttacagtggtgatgctattctgttctattaaaatattttacccactggtaacacaatcattactcagtcgatataagctaaaaagattgtaatttttattggtcttcattacatgagacagcatgagcactagttcagcctcagacactgaaattaaacaaaacttgagtctcactcccacctctacacttaccaaccttgttttccctgccaaatgactcaatcccctgtgccttacttcacccactggtaagatgtagataaaaatttacctgtctcgggtcactgggaacattacttgtgtatatgttttgttgcagatgcatacagtaagtgcttaataaatggaagtgactaacaccatgatctttggcttggaatctgattgagaatttgttgttatatgatttttggggggggaactccacagcaataagcatcacctcccttgtatttaacaactcagaaaggaaattgatcatgtctgcctctctctgccccaggacatatgcaacgtggactgatcaccttggcaacctgaaaactttacttcatgcattcaccccaagaatgcttctctcaatgcatatccataacattgtcaggccagtaattactctgactgaaataatagtgtgttaacagatcaagcctccagggctcatcagtaattccttccctctttcctcggtgaagatttcagggtccaggggatttgagctgttattggcctcagaggttttccaatggttggttctcttactcataatgcctctggcatgctccattttcccagcaccacaagttgcaatcaacacatgctggcagttgacatcttttaatatttgttgctctctttctgcctagcacttgtggctccatcttgacatgaagctgttcctgttattgccattactagctaaatagcccttggactctagctgggaaacagtatcataaattgcttagagttatcctatttcctgcaaacaaaaacccaggcagcttcaggcccatttttactttattattcatacagccaggccatttattgcaggatatcgcctctccctgggttggagtaggcgaattattccatttcctatcataaatgtgcaactcctgattcagcagccccaacaggaggcatacttgggatgaaagtgttggaacatttgttgttgagagtagaaattcattatctatccctttctcttatttggcactaaacagagagtggggctgaagaggtgaattctcccatctaggtagccaatgggttgggtcattgttatggagagagagataaaagagctagcttggacagatgagtgtattctaacggtttgttggttctatttggtggagtcctgttaattacataacatgtgcctgtgtctgtgtcttttaaataacatttctaaccacctggagaattgtgaaaaagcagagggagatatataaagaatgggtatcattaccataaaggctggagaaaggtttgaagggagagaagaaatatgctcttgcatcagttatgggatttttaatagaaaggcaatctgcttaattatgggaggttttgcattgtaaattactgtacaagtaacatcatggctgagggaggtgagttcctcagggaagggatcggatgtttataaaagtagaaggaaggctgggagtttttctcactaaatgaaaagaaacttcttaatatttttatattttagtaaacaaacctattggacagagtgcttgcttattttggatgttagcaacacagcagcactgaatggaatggcacacacctgtaatcccaatactctatagccagatgctccagtgagctacacagagagttctaggctaacctggaatatattaaacctggtctcaataaaacaaaaacaaaaacgcactctcttattgcatctcacattctcctgtttattctctataaattccatttccgtgaaatgtgggaatgaaggacgtcttgtgttttcaagcttacctggtatcgtgtgcaccctggcagaacccacacctctcctgttggctgggattgtgcattgctgaggaagagaagcaccttgttccctggggagagaagctgcccaggtgagagtcggactccttcaccatatcccagcattctttgctaggagtactgtctcccgagtctacaaagagccagtagctgttcagagcatctcatcttgagaaagagaagatggacatctggaaacttatgaaaacatttaagtttgtgtttatttgaaagaaggaaatcaatttcaactgatccctccttttttgtttgagaattgttggattgtcctttgctaagaaagaaagcatcatgttagaactgtccctgcttggagaacagtctcaggtgacagaaataagcagcttagggcctggtccctttctgctgtggccaccttgagaggtgtagcgttattgaggatcaggcttctccaccagtgacagagaaactggatatcactgtggcaaagacagactcttgtcacagcatcaggaaggttgaaccactggcctagagtcttctgactctaggggtagaaactcaattatggtgttaagttctaggaagaaatggttatgccatttaaggctctgtcaacatcaacttagaaacagcaacagacaatattcaatatttcagtacaagggcatgagactcagattcaggctaggactggatcttatttaaaggatcatacatgaagatttccagaatgtctcttttagcccattctgcaatgactttgatgaagcctgctctgttaccagataaaaatcacttagcatacttcataatataaacactatcaatctctaacagaactgatgacttcattatctctgctcaccaaacacagtgtcttttcactgacaactcaaattatgtaaaataagtagaatggggtggaattctttgaagagagtggaaagttgtcaatgcaatataatgtcccctatgtgaccctgtcatggatgaatgacacacttttaaaatatgctgcactccctacatgatgaaggaatgatcaaatgaccttccctttaagatgtaactttccaaagacaggttcatcttcttatataagaccaagtggaaaccacagctaaaccataaaacaccactgatgaagcaaatgtaactcacgggcacaaaaagaaatgcactggacagtttgaatgtatccctgaaaaggttacttgttggaaatgtatctctgaaattcatatgtaatagagacgggacctttggaaagaagctaggatcagatgatgccacgagggagaaggcaccacgatagtgttaatgaatttacaataggaagaaagacttagctgtaatgtttcttctgtctcaccatgggatactttttgccatgctattgtggcaaaaggacctacaataatatgctacggggactgtgacactgcactctagacctttccatcctccaaaaccatgaaccaatgaaccctctattcatttctattccttttcatttttttctttttgcttttgttctaatttgtttgtaacagccagagcctcaatttcaggctggccttgaaactttaactcatcatgaacttcttgcttcataccctcaagtgctggtgattacaggtgtgtgcaagtgtgacggtttgacatctattttttatataaattaatcctgtagcatccattgaagtaatagaaaataaacttagaagacggggattttatttaaagcaataggtgactatggtttagattgttgtcactaggactcattactgataagacagtgtacatggtttgcctgccaatttttgacacaaaattggagatccctctcagtctcccattgccctggccattgattagagaagtgtatttccaactggcaaatgagcaaggaaaagacaaagcaggtgttcaaatgtaaattaagatgcagaaaaatgcttacaagagacaagataaaactaagaaaactaaggaatcccaaaaaaatacctcccaaatatcccataaggcatttgtcattcgctgtcattttataagttaagaaatgcaaagttagccaaacagtagctgaaacattgtcctcaggaagagctttgtttgcttttgtgacatggaagatatcaaaataataataaatctagacagtacacaatagtaagcacttaccatagacaggaatgacctagagggatgcaagttgcctcaaggccaacaagatgtacatctcaagcatgatcaactctagcagagtaaggcaaaatatctccataaaggaccagctagcaaatgttccacttggggtttacataaacagctctttggtacactagccccaaagtaaccatgcacaatatacaaacaaaagggcatcagtgtgttcagtaaaactggacttataaaaaaacacagtcaattagtaagatatgtttcactggctgtaacttaacaacacttactcagaagaatataatgggagctgagcaagtagtctcagcttcaaactgcaacacacacatgtgtctgctcttcaacaagacaactctatttttattttatttgaaaactcaaactttaaaaactagttctttacttataaaactatacttactataaaaaaatctattatttaatgaaaattttatccagaagatttgtgcttgaaaagaagtcccagagctaatatttatttgattacacaatttatgggtttgaaagcaaacctttctgggatacctgataacagggatagatggatagacagagagataaataatatttaccatccttgaaagagcttcctctctatttctagggaaagtttcaataagaccttgtctccaacattatttattaatactatgcaaaatttagttaaatagttttaatcagggatgtttatgaaaaacaggatccactgataaactttcagaatgtctgaggctagaccccagccagtgtctttcaggaatgagtggcgaatcacactatgagaatgctactgtgaagcaaacttaggacccaaaccaattatttacaaagtcaagctctgttatagaagcagaggataggacaacggcatttgttttagacaagtgttctttctattgtggtgttttcagggacatctgtttgccctggttgtctgaagaatagtttactctctgctgttctcttcactcatgctcccttgtgtctgctcttaaaggaaatgtgtttaaacagcacagaaacacaacctgcacagtgtaagatctatattttaactctggcttggtttcagacctttctcaggtgtctttgggggattgagttcatattctgttccaagagtatcagtgctcaatagacaagagtgttgagtggagttgaaatcactggtcaaagatgtattttttttttctttgcaagtccagacctcattcagaatctaaaaaaaaaaaaaaaccttcactctgccttcataaacaatagctgctgtaacttctaagacaaaaataaaatagaaccatagtaacaagaaatattgatctctgactaacaatgtacacaaaaaaggaacacacgaggaagtgcaaaatgtgttctgtatgccaaatgtgagcatgatgacaatctgcaaacatatagaagctatcagaaacccttccttgggaggaagagccaccccattactgagatcagggtacaagaagagatgggtcctgatctctctgtagctttttgtcaaacccaaagtttctgactaccttgactacctagtttcagccagttttgaaaaaaaaatgtgttttggcacacaggtgaagccctttactaaccaagaactgtggatgtggatacagagagagtttatttacaactaagccaactattcccagaggttagactcacttttaaaaaatcttgtggaaacttagccctgggaaaactctatctccactcccccaagggtgtcaacttgggaaatattaattcaatcataaattcatacctttctctgctaccttctacgttccaacagtgacaggtcctacactttcctatcaagaatccctatgaatcaaaatgcccagggaagcacaaaaggttgctgacttggaaaataactcacaaatccagagcaaaaatgctatttctccactcgcagtgccaggctacacaccatatctacagtaatgtttcagtgccagggaaatgttgcttgcctttgtcattgcactttccttaccaagaaagaccaactcagaaagatcagccctagatcatgcctcttcttcttttttaaagtttcatctttctaccctgtcatgatattatttttccttgcattttactatatgtactagttacttttctattgctatgataaaataccatgatctcagtcaacctttaggagaaagagtttattttggcttatggttccagagtgtgagtccatcatggggaggggagggcgggaggcaagacagcagaatactggaacaggatgctagctgctagcatcttcatccacaacagtaaacagtgaaaaacaacaggaagtgggttaagaccatatacgtccaaagcctgctctacccattaaagtacttcctctatcaaggatctaccttctaaaggttcataacctccctacctactgaggactcagtgttcaaacagatgagtctatatggggcaattctcattcaaaccacaatactatgttatgtcttataataaaaggaattgatttaaaatactacatgatgcaccaggaattctgagattggactctctagtgtttaactatctatcaggatcatctagaagcaatatataatctcagaatgaattccaaacagatagagctggagtcttcatccttaaagatccctaaatggctagcacacaccataaacctgaggaaccaaagttcttactgggcaaggaccataaagagccctcacctactcctgggatcctgatttttgccatgacagaaaatctatactgtgcagattgggcagaaagtaatgcttgagatatttctcctgtgttttctttagtcaaaaggatgatagccaggcatcatggtgccctcctatgatctcagcacatgggaggcttagtcaggagatctagaatccaagccaagtctgggcttcattctgagatcttgcttcaaaacaacaacaataaacaacaagaatagtagggaatcatttatcaatgtcactttgtccaagggaagtgctatagacaagaatattccaaagagtatcagttcttctcattataccaccagtgaaaaagagcagtgtggagcttgcaatgggtgttcactaataagctgccagtggaatcctttatttcattgctgacttatgtaaggatctcaaaaacttagcagtgtgatgagcatgagattgcctttctcacggtttcattgccacttattctgtcaaaacgattgtcttgtgagactcagagtcagttgtcaatctcaaatcccaacaacaacactgcagatgaggctgcagacttcaggatattcattgacttcataatccatgcatcccaaacttccgagggcttgttcaaacctaactacatggcacacaactggtgggcactcaacaaacactgctgacagactgcaaagatccatcatcgctggcctgagtttctgtgacttggtccagcctcagagggaaagcattcacaggcttctccatccatgttgagtctggacagactttcaccaacacagagagctaattgcttccttgtcttgagattgcatattgcttagtgctggcatgatgttccaaaacccaagaagcacaagtagtgatcccccaaagctgctttaaccttttcaaactctaacaactttattgtctacctcattatactccccagactttctctggatgacagtctgatgtagaggactcagccagtgtcctttattagcactttcttctctgttggcccacatagcaagtgtcctgagaattcagaagaaaaacttaaacagccttccttcaggattttagtccttcatgtccccagcagcttttccaactaataagtctaatgtatgtgttcaaagccatggactgatggcaagaggctttcccaccccagcttgatgcaggacaagcacctcatcagataatttctccctgggtggatttcccaccacaggagaagaacactagtgggaaacttgggtactcacaaaataaaattaaagtgtgcaaaaaaaggaaaataactgggcaaagcctgggaaggtgccctataaaattatagttatattgtgtcacagttcatcttggtactcaacttaattggatctggagtcaatgacgagacatgcctctgagggaatctacagagtatgtccagaaaagattcactggggaaagaagacccttgctcccaccgttcacagactctcacagaagcttagatacagagctctgaaggaaagtactcatgctttgtcccaccatcaccaatacagagcatttttgccctcttcccgactgatgctgatgcccatcctttgtgctgactgaagaacccagactccttagccttgaagaaaagctactctttgggggatcttccagtcgttccatgcctggttaggaccactgaggcacccagctgtatggagtgagcagctaccaagttctcgtttttctgcagtgtgaagtcagctgttgttatccaggcatactgtgtaagccaatctaataaatgccctttgtaacaaccattctatcagctctgttcctccagagaacactagcactctaccatatttgatagcagccatggaacccctgttaatcttatctgagtcagcttgcaaattcactcatccctttttttccatttaccgttcttccactccagcccattcatctatctataaatgggcaaagctcatcacatgcactataaccctactgtttttctaaaactgctacattgatagtgtatgagaatgtgtgcaaacaaatgctactttgatagttatatgagaacatgtgcagacaaactcaagtgtgacactcttagtttctattcaatataaaaatgtagtaaaactcaaggacaaaaagaaataaaattagggtctagagaaacacctcaaagatgagaagtttatccttagcaagaacaattcttgggactaggggagtgactcagttgcttacctcacatattggaagcccaggactccatcctcagtgccctctaaacctggcacagagacatacacctgaaatctcagcattgaaaggtagaagcaggaggatcagaaaattcaaggttatcctcagctgcatgagttcaaggttggcctgagcaaagatggactctgtccaaaaataaataaaacattcaagccattttatttctttttttgttgttgtttttgtttttcgagacacggtttctctgtatagctttggagcctatcctggcactccctctggagaccaggctggcctcgaactcacagagatctgactgcctctgcctcccgagtgctgggattaaaggtgtgcaccaccaacacccagccaagccattttcttagcagtttccatttccagtatcttctgtaagaaaaccatgtacaattttatccatgagcttcttcctatagtcacagtgtgtgtcaggaatatttttagtcttaaaacactcaaagaatatactctgcaaagtaggcattaaaaaaaaaacagggaaatttcacccctatttatctgtttgtttgttttttaaaattaaacagacacaatattgtcaaataaaaggccctttcttttcagagaaaaaaatctgtttccagcaccctctactcagtgtgaagagacaagccaaacacaggatgctgaatctgtgggaccctcctgtccatttattatgcctaagaaatttgttctgatccagggatcttatgtgtgaaccttcttgacagtggactttgcctcctgatgttcacacacacacacacacacacacacacacacacacacacacacacatccttcaaacaccaggctgtcaggaatctcagaaaggagtggaatcaagcacacagactccccatgtgacacattcagattagttactttgcctaaaacaagtagcagacaaaaacagctatttcattcatttgaagacaatagctttcaatttaacacttccaaaatcccagcatgtctgacaatggccatcagagtaaactgaagttagattctgccagagagggggttctggtcctcatgtctagagaatgtcccactcctcatgagcccagtgccatgaagaagccatgtgagtttctttcttcgccctcttggatggcagagttcttttcacttatctgcatcttaaggctgtagataactgtttttgtctcacctggataaagggttttgcattcagtggctttttctcttggccttgcatagagtggaaagtcactgcagatgtgaggaactacctcagaggggagacacgaggggtgcataagataatttgtgtaaagagcccctagcagtgcatgccacttaatgaacacataatgacagctgttattacttctgccttgccatcaatatccaattgtcactaaacagagaaatgtgataattacttacttctcttcatctatgaaaaaaaatgcaagcctagaagtgaagtttgaaagccatttggaagagtctaaagaaagctttgccccatgaaatgtgaggggactcctggcccttagctagtgatggcctcggtgaagcaggcctggtttctgaggctgatttccagaaatggccctgccaaatgtttcagatcccctctaatggctgagaatgtcttaagagaaagtgtttccctttctgtgaatagaaagtggataattccaaggagttctttctccatgcactcaaagttggctccctggggctctgcagatgctgcatcagcagggtgggtggctggcaggcaaagacacatcctcttgcatcccagaaactcattggaaggtcatgctacattgatagttcagtaaaacataaccacatagcaaaagccagttcctttttgttccctttacaaaaagctcttgcaatttaaattactccaatgtcagggaactcatacatgtgttcaggagctgagtgtctatcttctgaatgggctctgaactgagacttcagactgtagaacaagcctgtcaatgcaggaaacctaccgcccaaagcagttgttacacactttgattatttgataatattaggacttagaaaaaacacgccttaagaacaaatgagcacagcaaggcctgaatatcccaacacagatgaagcagaagagaatgaccataaaaacagctacatgaagatgatagagaccctaaaagaagaaataagaaaatcctttaattggaagaaaaaaacaaaaaattaaagaaatggaggaaaagacaaaccgaaaattgcaagaaacaattcagacatgcaaagttcgaaaactgaaatagaaacaatttaaaaaaacaatctgagggaatgctggaattagaaactatgggtaaatggtcagaaactacagatgtaaacataaccaccccgaatacaagagatggaagacagaatctcaggcattgaagatacactaggagaaacagattcatcgaccaaagaacatcataagtccaacaaatccctaaacacaaaatatgcaggaaatatgagacaccatgaaaagaccaaacctaagaataataggtacagaagaaggtgaagaaacccaactcaaaggtacagaaacatatttaacaaaatcatagaagagaacttttccagcctaaagaaagaaatcccaatgaaagtacaagaagcttataaaataccaaatagagtggaccacaaaaaagtcctcccccacataataatcaaaacaccaaacatacagaataaagaaagaacattaagagcagcaaaggaaaaaggccaggtacaatataaaggcaaacctatcagaaatacacgtgaattctccatggaaactctgaaagccagctacaaacactaagagaccacagatgccagccaagactactacacccagaaaagctttcaaacactatttatggagaaaacaagatattccatgtcaaaaccagatttaaccaaaacatatccaccaatccagccctacagagagtactggaaggaaaactaaaacttaaggaaattaactacactcaaaaaaacataggcaatagataatccaactttaccaacagacaaaagaaaagggggcataaaaacacacacaaaaccaacaacaacaacaaatccaaaacaaataagaattcacattaaatggtcttaatttccctcaacattaacagtcttaattcacctataaaaagacacaggctaacagaatggatagaaggacagaacccattcttctgctgcatacaagaaacacacctcaagttcacaaaaaaacattacctcagagcaaaggcttgggataagaatttccaatcaaaaggacccaagaaacagctggtatagctatcctaatatctaacaaattagacttcaaactaaaatcaatcaaaagagatgaagaagggcattgcatattcatcacaggaaaaatccattgagatgaagtgtcaattctgaacatctatgcccgaaatacaaaagcagccacgttcataaaagaaacattactaaaactcaaatcacacataaaaccacacacacttagagtgggagacttcaacaccccactctcaccactaggcaggaccaccagacagaaatttaacaaagaaacaaaggaaataatagaagttatgacacaataggttttaacagacatctatagaacatttcatccaaatagaaaagaatataccttcttttcagtaccacaaagaaccttctctaaaactgaccacatacttggcaacatagcaaacctcaacagatagaaaaaaaaatggaataaccccctgtatcttatcagaccatcatgctttaaagttagaagtcaacaacaacataaattgcagaaaacctccaaactcatgaaaattgaacaatgtgcaattgcaccatttctgggtcaaggaagaaattaaagacttcctagaattcaaagaaaatgaagacacaatatatccaaacttaagggacactttgaaagcagtattaagaggaaagttcatagcactaagtgtccacataaaaaaagaagaagaaaaagaatagtcacacaagagaattaacagcacaactgaaagctctagacaaaaagaagcaaacttaccccagaggagtagatgccaggaaataaccaaattgagggctgaaatcaataaagtagaaacaaagaaaacaatgcaaagaatcaatgtagcaaagagttggttctttcagaaaatcaacaagatacacaaacctttatccaaactaaccaaaaggtggaaagagaacatgaaattaacaaaatcagaaatgaaaaggggaacataacaacagacactgaggaaatccagagaatcttcaggtcatactttgaaaaactgtactccacaaaattcgaaaatttaaaggaaatggacagttttctggatatatatcacttaccaaaattaattcaagaagagataagcaatttaaacagccctataacccctaaagaaatagaagcagtcatcaaaattttcccaaccaaaaaaagcccagggccagatggtttcagtgcagaattctaccagaaatccaaagaagagcaaataccaatacttctcaaattgttccacacaatagaagcagaaagttcaatgccaaactctttatgaggctagaattaccttggtacccaagtcacacaaagacacaactaagaaagagaactacagatcagtaatcctcatgaacattgatgcaaaaatattcaataaaatctggcaaattgattccaagaatacatcagagaaatcatccaccatgatcaagtaggcatcatcgaagggatacaaggatggttcaacatatgaaaatctatcaatgtaatccaccatataaacaaaatgcaaaagaaaaactacatgatcatctcacttgatgctgaaaaggctttgacaaaatccagcaccctttcatgataagggtcttggagagatcagggataaaaggacatacctaaccataatgaaagcaatatacactaaatcaacagtcaacatcaaactaaatggagagaaactcaacaggattcctctaaaatcaggaacaagacaaggctgtccagtcatacctcttcaatattgtatttgaagttctagctagagcaataagactacaaaaggagatcaagtggatacaaattagaaaggaaaaagtcaaactttcactacttgcagatgacatgatagtttccatgagtgacccgaaaaactctactagtgaactcctccagctgataaacaccttcaggaaagtagcaggatacaagattaactcaaaaaaatcagtagccctattatatacagatgataaatgggctgagaaagaaattagagaaacatcaccctttacaatagacacaaacaacataaaaatatcttggggtaacactaaccaaataagtgaaagacctgtacagcaagaactatgagtctgagtctttaaagaaagaaattaaagaagatacaagaaaatggatatatctcccatgatcttggataggtaggatcaacatagtaaaaatggcaatcctgccaaaagcaatctccagattcaatgcaatacccatcaaaatcccagcacaattcttcacagactttgaaagaacaatacttaactttatacagaaaaacaaaaggatagccaaaacaaccctgtacaacaaaggaacttccggaggcatcacatccctgaattcaagctctattatagagctatagtcctgaaaacagctgggtattggcacaaaaatagacagacagaccaatggaatcaaattgaagatccagatattaacccacacacctacgaacacatgatttttgacaaagaagctgaaattatacattgtaaaaaagaaagcatctccaacaaatggtgctggcataactagatgctagcatgtggaagactgcacacagatccaaatctattgtcatgcagaaaatttacatccaaatgaattaaagacctcaacataaatccagccacattgaacctcttagaagagaaagcaggaggcactcttgaaggaattggtgcagggtactgcttcctgaacataacaccagtagctcagacagtgagattgacaattaataaaggggacctcctgaaactgagaagcttctgtaaaggcaaaggacacagtcaacaagacaaaatggcagcccacagaatgggaaaagatatccatcaaccccacatctaacagagggctgatttccaaaacatacaaagaactcaagaagctagtcaccaaaacaccaaataatccaatgcaaaagtggtgtacagaactgcacagagaattctcaatagagaattcatttttccttttggaacattcttagactgcagagttttctttgaaacaaaaactttaaaagtaaaaactcaaagaaatcaaaataaggttctaaggggaatttacaaactcaaggctcctgatacacactgcaaatttacaaaccaaacgtgagagtgccacctgaaaagttttcattttctcagggatttggatgcatcctgaccactgactaacatcggcaagccattggcctgtccctctccctcatgccacaaatatagaaaccaaggtccccaagaggtcagggaacaggaggacatgtgtgtaagtagtgacagaggaaaagaaaagcagattccacctcctcacttccaattcaggctgctttgacccaagtcctaaatgttgcctctcagtgggacttctgtttgttttgttttatttaatctttgtcttcaaagccttctcagtttaacatgctgctatgctggaccccagcacttctgaggagcttggcagtgaccatctatcagagtgaatttggagatccggacatagcaaacacaggcatctacttataatcatccctttcaagttgaaaagtctcttatgtttgctccagtctagtttcatctctgaagaaaataaagcagttggagggaagtattgaagccagcaggtaaagagccattgtggatggaggtaatttcaggtggagacccatcttgcttgactgtagattgtcctgccctcatctagaattcagaaaggaatttgtggaaagaagggagccatgagagtttatgctgaacagtgaatgtgctgcacattttctgaggtgcatctccccttaaaggaaaaagggaaggtggggttatcagtgtattctgttgattccccttgctgagctggctcctgctgcaatgagggaaagtctgataatcagatttgtgcaaggatttctgtccaggcttgctgagctttgtcagcaagaaaaaaaaagtgctaacatacagtgctttttttttcccagtaaatttctatggtttcatttaattttgcttttctccaactatagatcaaatattttcattcccagagaaaagaaaaatgtactcaccttggtactcatcttttcccctcacaaaacctggaagattacaaaaatgcggtgatataagggtaaaataactgaagccaattcctggaactctacgcataaatatggaattgacatccgtgtcttccaggccagcctggatgtgttcaagataaaccactgtgatggttaatatagatggtcaagttcaaacgctctacagtcacctaggagacaaacctctgggcatatgctctagttatctttcagttactgtgataaaactctgacaaaatcatcttggggaggaaactatttggcttctgcttctaggtcacaatccatctctgagagaagtcagggcaagaactcaaggaggaacagaagcataaaccctgaagaatgttgcttactagcctaccctctggctcttgcttaaccctcttatacatcccatgccactttctaagcatagtaccatcaaccatgatctgggccctcccacatcaatcataaatcaagacaatctttcatgaagattcattagacttggccacagttcataagtggttgccttgcaatgagactgtggtttgtttatttatttattttattcccacatactcacaaagctttctccttttagaatgatgttatgtgggtctccagcacttcccaaggagtttggtgatgaccactgatcaatctgattgagataattctttgactgagtgagattctctttccaggtgactctaggttgtgtgagttgacagtaaaatctcacatgtctgtgagaaagtctctatattaattgaggatggaatactctgtatgtagcatcctggactaaattaaaaagagaaaacaagtggagcaatgacttcctggctgtaggcatatatgacctatgcttttgctacatgcattccctgccatgatagacttgtgcctctgaactgtgagccaagctaacctttcattagttaccttttttcagttattttgacacagtaacaagaaaagtaacagagccactgaagaagatgactaagcattacctatgacccagaagtggaccacgaggccacgccacaggtctgagtttttccaggcaccaccataagttttaatatttcagagaagagaatggagcaataaatgcaaccaaatgtccccctattcacccagggcagaagcctggggtcccatctcccttctccctgtctcttcagtaatcaatctctgtgctcctttttctttttatcctttcctttgttttgtgggtttgtttgttggtttgtttgctgaggcagggtttcttgtgtagctttgtagaccagagctctgcctgcctctgcctcctagtgctgggattaaaggcatgcatcaccaccacccagctctttttcttcttttcaatctctctttccccttctgtttcctccaatttgatcagccctgcaactgtatttcctttgaacattttcaatccattctaatttattcatgtcatgggtttttctgttttcttttcgttccttatgttgctactgagtaagtttccttaaaaaacaaaattggttatgtgatatgcctctccaaagtcctctgtggctccctgtgacttacagaataatgacaccatctctttttgtgtcttttctagctctgttctacttttctggatgcatagtcctcctctatacccatttgttagcatgctccatcaacactctgggatctattaatttaattatgtttcaagacttgaactcagatcatttggactccaacacctgcaaggttaacctctccatgatgtagttaaaccttattatggtccaacagtggactctatctagattatgttttccactcactgcaggactcatgggcaacagtttcagcatgtctggatatcaattcatttccatgctcacatatattacaattttaatatatatgatacaagtaaactctcctcccacaatgtatacattaaaattctcattgagacaaaaccagtgcaaaaattcagacacatacctctaggaaagaagagtaaaatccagattatggaaataagattcaatggtaaaacaagaatcttagcagaaaatgaagtctagttccataggatttagcatcaggtaagggatatagaaggttaggactgagcttctaacatcaagtcatgaggaaaatatgtagtcattggcctaagataaaggaaactgcatctaaaacacggaataagtctaacagtgactacaatctggcccatctgtgaaaatgagactacaaaaatattgaccataaccacagggaaagctaatactgttaggaagctgtcattgaactgactctgttgggggttggaagattacagaattctaaacctcagatccattccagaatggcagacctgacttttcattgtttgtacaaatttaacaacatccaaataaaattggcctaagctattacagccacaaaacttgaacaataacaagtaaggatctattagttaaggaccagcagtagttctatgcttatggacattcccagaaaatacaacacacatggtgtccttatagtaaattattatgtgtaacaaggaaaagcaattaaccataagtcagagaaattatgacaggagatggtttaggtaaccaaaacaaggatcagtagagtcagctgagtagagtcagaaagtatgctaacttcagtagagtcagaaagtatgttaacctcaacaggaccccagaactatccttgaaaacaaaatgctacttgttatggctttaacttatgtgtttgcctatcaggtcaacaaggggacaaagggtgagctagcaatagttcatcttccttgtcagcttgactgggtctagaattacctaggagatgtgcccctgtgcttgtctatggggacatgttcagagaggttaactgagataagaagaactgcctggccaggtgttggtggcatacacctttagtcccagtacacaggaggcagagacaggcagatctctatgggttcaagaccagcctagtctacagaaccatttccaggacaggctccaaagcaatacagaaaaaccctgtctggaaaaatgaagaaggatggggaagagaaagaagaagaagaagaagaagaagaagaagaagaagaagaagaagaagaagaagaagaagaagaagaagaagggcagcaccatcccatgagcagggtgctgaagtgattaaagtggaaaagagatccaacagaacatcagcactcatctctctctgcttcctgactatgggcacttctatcttcatgtcttcccagcaatgatgggctgtattcccaccatgatggctaccatgatggactgatccccaccatgatatactgtgtccccatcatgatggactgtatccccaccatgattactatatcccaccatgatggactgatgcccacaatgatggactgcatcccctcaaaccatgattcaaaataagtccttcttttacatcgcttattattgggtatttagtttatcacactaagaaaagtaactaatagattaccaaaactacaaaggcaatttcctcctcccccccaacaaatttccctttccagtgttcatttgagtcctaatgtggcttcctacatatatatttttaattctctgctctgtgattacctttgtctatttactcagaaaagataactccttgtttccttatggatccatttttccatgtatcacatagaagctatagtaggttaatgtctacaaaatttggttctgtaatttaattcatgagtttatcctgattctgccacttagtaattaaataactttgaccttaaatttgaaccttaaactctttttcaatgcaaaatgagaataataacatgacttataaaaagatctatgagatggtaccataaactctcgacctagggcctggctcagaaaagtattggtaaatgttattcattattattcatgctaattacctggaacacatgctcataatccttacaacaaccttgtaaaataacactattacctctgtgttacataatggccaacagttcgaagaggttattaagtaatttgccaaaggaaaaccttctaccaagagggagagctacagcataaactctgaaacctactaggtcaacctctccacaacactcagggtcacacagaagccaccccccttcaaaattatacattatctactaactcaccaatgatgggcaacaatgaaaattcctttcatatttaggtttattgcacttcaaatagatgtctgaaattacaagaagcacagggaagactttcacatgctctgtggtgaagtgacaaacagatcttacccaccaaggttactacaagaacacataagctaggaaagtgcatttaagctgagacttaaagtcttatgaggcgcacatagaataccttatgaagatgctgtctactggaattacctggatattggaaggatgaagctgcaccagagtggttggggaaggaaaagcagatgagggaagtgaacagcagaaagcaagaaccagtggtgttaattaatggtcattaggtggagttcagaccacatcaagtgtcagggaagccacagaaaccttttaagggtgtgatctgatgatgttttgaggctttactttccaagtctaacagaagggacttcacagccagcatgcaacctatgaagaaaccaagcagaaaatcatggcaatgtgttggtaaggataggaaggcaacagagggagatgagaggagctgaaaacaaaccattgagagaaaatgatgagttacagagttgctgagggttacagagattctgatagaaatggctcgctcattcaaaatcactcactctatatttaatactgctccaccaatggattggctgtttctgggttctgtgtttactcctaaccaatgatccattagcagagataagaggaggagaaaaacaagggataatgctggagccagtaaggatgaaaaggtcccacagaaactgtcagctgcctccccacaatgacagagttccttcatagtacggagatttatcttacctaatattaattaatattgccccaatattactgccccaatattaattaataatgtctattatgtactactgcattatatgtaacttacaaatatattttcaaatcaattaaattatttaagataaaaccaatgtcatctttaactgaaaatctgactctttgttcccattttatctccatattcccctgtcttccacataactagaatatttttttttacttgctgaaagactttaacatttagtaatggccaaaacaaaaggaaaaagtggtacagagagaaaatcagcagttctgttcaataatcgccaattgtttccctgacagcgtccagacaaatcgtctaagtcacaaatgcatttgtgaccctcattttggaagggcttctctaatctcagggattggaattgaacttcaaaaatgggtatcaaggtctttgggggcccctcaatttgctgttctaacaccctagtggctgaatggccaccatcctttttcattcgcttaataaaaaataacatgaaaaactataatagccaaatttcttctctcaaatgccaatgtagagagcagtccttcccaaactccaaggcagtaaaaaaggcaactttgaacaatgctttatttttgcttcatttatttctcaatttttatctccagattagatatatacctataggaagggagacaatgctggaaactgcagagtggtttgatgtcaccaagcagattaagcaaagaattatctataatcaccactgagtccccatgtccatcgttcatctcatgtctttgtgcaggagactcaaaggtagcctggatttaaaatgaaaagaaaaattaccctgtgactgaagagagagtcttagagtcaatgtatcctccttcctgcccccattttcttaggaaatagcagatgaaatagctctcattggataaaataagatgggggtgaaaatagctatggaggctgaaatgcattcacattaattttatactgtgattgtttttgagtttttatgagtcgatttcttaacactccacttgcatgcaagcatccatgaagtatgaatccaagatgcagatgttttttagaaatattaaatataggtatatggaaaaaagtatccctagggaacatttagacttgagtttcagggcctgtacaaataaacaaccaagtatttctaatacaaatgtgcattgctcctctgaattatgaagtattttattggacataccctttggttaatgaaggtttgaataaatcctatgtgttttgaagagaactctgacagactcataacatggccttaaatttattccaatttattgtgtacattcgaaaattaaatgtaaataaaatggggggtgattatgagccttctgtccatacataatacgaaaacacatgcatttcaaatgactaataatgtcatgtagcaactgagctgcactgttaggtttaacaacaatgatgcatattaggcccagttgctcaggaaaagaaaattcatgggtgtgtttgggttttacagcaaaaccaaatttctaatgaacagcagtgggaacaagggtgaggtctacacactatattcagaccaactcataatatatttatgagttatatgtaaccaactaattaatttctatgggatagaatcgttcaagggttgaagacccacactgaaatgttctacattacaaacacttgtctgccactcctcagtgtttgaatgactgcagaaaactcactatgtatatacaatgcgtcatatacatacacaatgtgtgaaaaaactaaacatcaaagtgaaatgcagttcattcagtgttcgttgcattgcatagggtataatccaagtgaaacatacatttaaaatctctcatataacctcccccaaggactcacacaaggagacacacactagataaacactgggtttttcctttctgtttctgtttgtatgtttgtttttagaaccctaatgactaagatttgcttagccctgaacacataaacagcattctttaaggagtatttgtgactatttataactctactcatttgttctccattaggctgatgagttcgcttggtagaaaaagtgcttgcagggaaagtccaggaatccaagtcctaaggccataacctatatggtggaaggagagaatagaccctgcaatttgtcctctgtcctccacatgcttgctatggcacacaagcatccatgcctacacatacacatacacacaaacactcactcacacaaacatacacacacacattcacttgcacatacacactaaaaatattaaaattcaaattatataaattcatagggaaagacaaaatatgacttcatctacttccaaagtaaaagattttttaaataaaatatttcagttctaattaaaaaccatttccaatagatattaaaatactggaaatgcaattgatctcaatgtagtcccaataaaagtaagcaaacaaaagttagaactagagaaaagagaaataagataatattcattgagatgtaaactttactttagaatcttgtatttaaacaccagaaaagtgtaaattaacaataaaatatgtattccattatctcaaaattatccatgtcctaggaaactatattcagctatgctcacaattcaattcatctctagtatgaattcccaatatgtttttcaccctacacttatttttttaatctgtacatatgccagtatatcactcagcactcagcattcagacaataacaagcagatgtcatgtgaaatacacccaatcgaatccttatttctctcattaaaacacttccctacttaatttaggggattagaatcagtgtgggggtgggctgtagctggcccatgctcacccgtaagaatggtttcctataattagattccattaagatgaatccacaaaagacctgagagaagccaggtaggagctgaataggttagatcaaaccctggctcagcagctcaccaaccttgtgactcgaacctgcctgccagtctattgtctacacctccatctactccttcataaaataagtgccatgatacttaatcacacggcctaagagtcttataataattaaatgatataacataatataaataacctcagacactgcctgccacatagtgctcagtaaatattattttttcataaaaatgttcacatttagataaactcccagtgtactatactagtatctgtttaattatctaggaaaacctctaggacaggttttcaacttgtcgattgtgacccctttggggggcggtctaactaccctttcacagggatcacaaattagatatcctgcatatcatatatttacattgtgattcgtaacaatagcaaaattacagttataaagtagtcatggaataattttatggttggggtcacacaacatgagaaactgtattaaatgatcacatcattaggaaggttgagagtcactgatatagaacaagatttctttcctaagaggctgcagagatggttcagtccatcaaatactaaggaagcatgaggacccaagttcaagtgccccaaactcgcataacaatgggcatggtgttggaaattaggtgctcctgcagccttctctcaacagctcagtgggccagcagctatctacatcatcacaagtcgccaaccctttaaaaggtctctgtcacagactattctcttatgtgttctctctctctctctctctctctctctctctctctctctctttgtgtgtgtgtgtgtgtgtctacttatctctatctcccagtctctacctgtctctgcctgcctctcacatgtccccactctaagatgacttttgctctcccctatcccaataaacctcttctgtaagatctgttgtgtggtgtgattttctatgcagcctaccttggcccagacccgccaaggtactctgctactaaaccctaactttggttccattgctaattccttataaacaatagcacacatctggaatctcagtgcacctatagtgaaatggtaggcattgacaaaaacatccccaggagctgtcaagaaggttagcctggtataagcagcaaaaaaggagaccctttctgaaacaatatgattgccctatgaatccactcatactgtcacatgtacccacacccacacatagggatgaatgaatttatgaatacacgtgtgtgaccacaaaagattgttttcctcaaatgaagaagtcagcaatatgattacatgttccttctgtgtatataaaatgtatcctcattttttcttaaaaataagaatatttggttaatattactattagcgtaacaaaattttgtcatgtcaaacttctgcttaaagttttttaaatacaatatcgcattctatgaaagtactgagtaagggctagtagttgctgcttttaagtataattataaaataattctgtgtaacattttaacctaaggtgcagtagttgaccaagtgttaatgctgtcactgttgctcttatttttcctgagccccgttaatcagatagtgcatgaagtgattaaactacattctgttttttaatttgtaaaaagcttaagtcatttaattaagtatatcaatgatcattttgttgtctaaaaattattactgaagtttaatataagtgtaagaggcagatctgtcagttatttcaagcacctccccttaaaccactcaggagatggatcactttccccagaatgtcacacatagactcttagtaaaatacttcatcagtgtgattccaaaatgcatgcggttttcctcttgtcttgaaccttccacacatcagattagcagcaccctatcatgggagatgacttcagaaatatgatggcattcaatagcccagagtttagcgtctgttaacaaacttacccaagtccccacttaccaggctctagctgagtgtcaagagacatgagtgatgtcactttgccttagacttcagagcatttatctgagagagctgtcaagaagttgaaagggatataaggctgccagtgtttaaacacagcctgatgttagatatgattagcattgttactaactgtaggataatggaactataatattctaaaggaatcctcaataattaggtgaaagcagttgtaggagacctgacctcttgaaagtcccctaaagccttcagtgacatctcaaacatttatttgcagcctaaataccatagcatatgctctctgtagtgagggcaagttcatgtccaagaaatctacactcagaaccaggaaaaaaaaaaaaaaaacacaagctaaaagggtaggatctgacacacatcaagcttccctcaaccttcatgagtagtaattatccaacccatgttgtcccaagacctctagggaattgtcaatcaaggcctactggcaggagattccaaaggccacggggaacatctacacagcttctcactgtaaaatcctccaagtcccttaaaactccagatgagaaattcaaactgaaaagatctattcttttccaagacattgtgtgaaatgccagagtactaacactgagaatctatgctgataattatatccggggtgggaaattcctgcccctcagtgcctggtaggaatgtggataaaaaaggtggggtggaaggtgttctatctaggggccattttggttcctttggctctcatagttttataagttctcaattatagtctgaaaacagaagcatcttattttggcagattcattaatatccgatttaggtccagcttctcatacctgaggtagccatacagagtgttttaattctggcttgtaaaaataagtgtttttaaagatgcattcttcatgcttggatcatctataattacagtccacagatttatgtttggacatcaggtacagaagattctcttaatcacaccattaggttgagagcacattattagctctggtctgtgcaccgcccctttctttactccactcttctaattctctaacccactcacattcctttctcatgccttggccaagtattttaacatattttatgtctacctttctgttcccatgagcactcacaatatgaatgtgtttctccttcttagcatgcatttttttgtgaaacagtaaatattcctttttggttatttttgtttttatcattgtgtttttaaggttaaccttctttaagaacacctaattctttgatctgggatgcagcaagaactaactccgagtgtatgctcactgtatatgctctcacttctctgcagaggaatgcctccgcgtggtgtgattgttaatatttaactgaacgccaacctgtcatgggagtcacttggaagatattccttcaggcacatctgcaaggacatttccagagaagtttggctgaggatggaagacccactgagtatcacagcaccatcacatgggctgaagattggattaaaaacaagagagcacatgaggaatgcagcactggttgctctcctgctttctgattgtagatgcgatgtgaccagccacatcatgctcccatcactatgccttccaatcacaataaagtgtcccctcaaaccatgactcaaaataaacacttccttctttaagttgctactgtcagttaatttgtcacccattgaaaaaagtaactgatgcacaaggtatatatggtccagtccaagatgcttctacaagaagatggtggcactattgtataggtcacacagttacctgatgaaggacctttgggattctccacaacaaatcatgtctttcttatctagttgcccaccagaaaccaggattagccaacatgcccatcagtctacagcctccactcccaatcattttcattgtaatgtttagctgcagacagtttaagtctttcttttcttatttataaaaatttctcttaaatatatatcaaagaaaattggctgaattatataagcatcattaaacacattgagaaatgaagaagctctcagatatagccagatgctaaaggcattctgcaaaccatgtattcatttctttgcacagtcaagattgaattggtagattcttagatataaacttgccccaaatcttttcttaactaaaacataattgacaatatatacatttggaggttatgatgattattggtctagaatccataacttatacctacaaactgcaaaatcatctcttcattggcccatcctaaaagtatggaaaaaatgctatctgtgacaactattgttatttatttaattttagctttattcattttatttattcatttttaactttaaccattggattgaaaagcataggcgagtatagaaaaaaatgcagtcagaatactgccccacccgttccacctccaacctacttttatggattcctcaataaagactgttctcattgtttgttgcataaaattgaaccgtattattgatgattactaagaaacaatacttgatgacatttttacatacaaatatacctcaaagataataataaaacaaatgcttcaataaagtgtatatcagaataaaacaagaaacatggattttttggtctctaaatatatatatgaaagttatatttatattatattgtattctattaactgagaaatgctatcatgtcgcaaatacacatacttcttttaaaactgtgttcctaggtgttaaaggtcatgctgaccttcagcaaatgttaccttttatgctagtggaggatgttgccttgatgttggtgagcaccaacagaccagggtggtggttgctgaaggctagagtggctaaggcaacttcttaaaataagacatcagtgtagtttgccacatcagttgactcttctttcctttcatgaaagatttgcggatagtgtgtgatggtgcttgctaccatgtacccacagtagaacttctttcgtaatatgtggtcatcctctccaatcctgtttttgatttagcaaccgagtttatttaatattctgtatcctttgttgtcatttcaataatgtgtgatcatctcggaaaacaattttatttgcttatctgaaagaattagttatttatctaatccagctttatcaagaaattacaacacatcattcacatgttcaggctccatttctaagtctatttccacatatacagttattagttctacctgagtcctagatgcctcaaagatctccaaaagggttgaggtcaacttcttccaaattcctgttccttattggcattctgatcttctcccatgactcacaagtgtttttggtggcacctagaatgtgagcactttccagattttcaatgggtattactcagatccatcagaagaatgacagcccttaccttataaaatatatttattaattaacaagaggtggaatttaaaatgattccttgttccattgaatgtaaaatgggtgctatggtggcagacataaaaacagcatgagttctcttatacatctatcagtgctcttgggtgactaggtacatcatcaataaaaaataacattttgaaacgagtcctttgtctttcttctaaaaagagacaagtatggaatactcagtaatccatgtcataaacagatgtactgttgtcagccatctattgtgacatgtataagccatagaataaatttaggataattcttagagatactaggattttcagcatggcatgttgttggtacattcttggaacgcagtcccaagaatggagtcattcttgtgaggggaattctgagtgcttgtgagaaaactccaagcaaacaagacaaagtcttgtgaccacagtttcttcaaaagcacaaaattgttcttggaaggtgtagcagatagcagggagttacttcagctgttcttatttgtatgcctctacggaaaaacatttttgtcacatgtggtttgtctttgtggttgaatgccttactcatggcattcttctcaatcctcggagtataaattgtctgatgctctgaataaagttgactattgcatgagacttaagtttatacatttgtaggccctactccctcaggttgacaccaccaattagagcagtaaacagtatgtgatcataagagtaatgttgttcccctaaaattcataatttaaaatcctgctcccccatgtgtctgcatttaaaaataacatctttaaggaggcaatgaaggcaaggcagagggaacagcaccctgaaaaaccaaaccttctgaagcattgactttggaccgcctgtctccagaatgaagaaaaaataatctgtttctgatgtatatgcctctcagtctccaatattttgttatgctgtactgagccaaaaaaaaaaaaaaaagaaatgggaggaaaataaaatcagacttacaagctgcattctaccaattttatttattcttgcttactctgaggcttctaaatttacctcatttgggtgatgcatacagaaattcaccattatgattatgtgtttgtcagggtttgctagtatttctaacagtttcgttgaatttatttaaatactctgacgttcagtgcacacaggtttataattcactcataaatcttgcctcccataattgcataatattcctatttattctgttaatgtgtttatttcatttagtgtttttgctttcagtcccattaattatggtataatattaatactgtaactactgcttttcgcatgtgtttctctttagccaacttgtatatgttgacttttttaaccttatttttaagtggttcttgaatatttatgcacattaaagcatatttagactggctttttacctcatacaaatattttcagcatttaaataaagaattcagcctttttatacattgtttaataagttttcttttttccataacattacacatttgtgttatagttttattatcacctatatcccatgttctgctttggggtacatttaatgagatttgtgtttatacattctctattttttaaatcatttttaatgtgcattaatgtaagggtgtcagatcccctggaaccggatttaaagagaattctgagctgccaggtgggtgctgggaaccgaacctagatctctggaaaaacagtcaatgctcataaccactaagccatctctctaatcctagtctttttctttttatttggacatttttttttctgaccctactctttatttagaccatgacaactttccttcctgaaatatgccattcatcatctccaatggaatgctatttattccagtttcttcccatcctaagacaattagattagatacttcttttggcttctgtcttttccaactagatgaagtatttagatttattttagttaattcttattgcattagtgttttttttttctttttcagtgacaagatgcctgaaagggcaacttattgaaaagggatttgttttagctcctggtcatattgtctattgtggtagggtagcatgttggcagctgaccacactgtatccagtcaggcagtacaaagatgagtgcatctggttctcaaatggcttcttctttcttcagtctgggacctcaacctatgggatcacaccatccacattcagggtgggtctttctacctcaattatatatctccataaatgcccttgatgacatgcccagagctgcatctccaaatgattccaaatgcagtcacattaacagtcaacaccaactacttcatctatcaatagactctacgaaaaaaatcttgaagctttggtttgataagttagtgttagaattccagacagctacgggtcccactgaaacataattcctcatttaagttttgttttatactgctgtggtccctttttttggtatcctaccatattaattaagctacagatattgttggtctcattggctacaacttgtctcttaattctctgcaattaaaattgctttttctcatgatttgtcatctggtagttttcttcttcctctaatccagtgcttctcaacattcttaatgctgtgaccttttactactgtcctcatgtgtggtaactacaaccagaagattagtttgttgctacttcctaactgtaattttgctactgttacgaatcataatgtaaacatctgatatgcaggatatctggtatgtgacacccaaaggagtcatgacacacaagttatagaccactgccgtagtccttttctaataggaaaagtagagaccacacttcttacccctaccccaacatgtaaagatagatttctttcatgtttttagtgaatgccagtccttgagtatcagcccgcctccctcatcagtctcctggttttagcatccactgtactaatgcaaagttttctacaaagagccagctgttaacctaggactctgtactataatagcagggtggatagtggtgtatgtaggcaaaatggtagtcttcctcattctttcttattctataactagcttgttctttcttcctgaatgattggaaaatactttttcctttaaaaagaattctgattgacacataccacctgttgatatttatgaggtacaatataataagtgaattcacatattccttggtaatgatcaaatcgggataattatcatatctatcaccttaaaattttatttccttaagatgaatgcattaaattcctctcttctatttctagatatgcaatacattactgtcgattgtattcaccccactgtagcatataataccagaacacattattcctattaaacaataatatgatacctgctgagttcaggaatattctcagggcttggagtaacagtctcatatttacttttttgagcttcttgcagaatctgtagtcaatcttttgtcagatcagggaaattttaatcttttgtttgtctctcgtgtattttttattttcccactgctgctctataatttgcttgttataaaacagaaatgtatgaagcaaatctgttgtatttctggtggtggttcctgttctttgtggctttgttttgctattaagattttttcatctaccttagccttctggtctcagatttgccaattttcctttcaaagtatttcccacatctgaggctgggaaacaatgacctcttttctttccttggagaaaatgtgtgttttcattagatcaatttttattgttaagttaaattcatcagggctagaggaatggctcagcagtaagagcatgtgctgcctctgcagagaaccaaaacctggttcccagcacccacatcaaatagctcactactgcccataattccagatccagaggactgaacacttctgacctacacaggcaccatactcacatggacattcccacacatacagaaatacaatgtacacataattaaaaataataaaaattaagacattgtttaatgtttaaatcaagttaaatgcatccaactctccaaacattttcatttctttataaggaaagcattcaaaaattattctcttagctttataaaatatacagcacataattgttattaatggtttaaaaggactcagtgagaagctacacagtctaatcatacttaaagaaggccgaaattaatgaagacaatagctggaagtgaagcttcttgggtagagctagcaaaagacactatgactggtgaattcccaccctgttccaagagcagcaaagtgggaaagtgtgagatggataaccatggggaacagagccttctactaatgaagtctttgacattgcctaagtgaaatgcagagctgctgcagagatctgagtgatgagtcacatcctattaagtataaaataatcactactatgtcgaaaatcaatggaagagtggaaggattagactattcaaactttacagaataatccagatgagaaatgagaactgggtagagttctatcgcagggttcatgcttagcaagcacaaggaattgacttcaatcctcaggagagaagacataatagatcagctgacaccagagaaggtacagagagtggtcagatcttaaacatatgccccaagtagaagagatgattaagggtgaaacagaagaacgatgcagatgccaaagaatgaagctgataagaggctcatagaaggaagaattgatgcaactaatccttggaatagttgagaaaggatataatcaattccacaaaatgagaaataattaaattaaagaagagcataactattcggctaggattatgtggacagaggaaggtctgagtctagtcatggatactaaattaatacaatgtttgctgtgtttgtctgatgagaagccaatgggtagacaaagggtaagtctggaaaagaaggtcagatcctgatttttacatgagtttgaggcatcaaacatccaagctagtgtggcatagagcttcatctggacattagagtagaagtctgtttgggagaatctgttactagattatagatggcatcgagtgttctgaaacagtatagaatgatcaaggagctagagttgatagggggaaacacatcaaaataccaagtaatagggatccaacattaaaggattgtgaagaagatcatccacccgagagatgaaaatacagcaaggagtggattcatatctttgaaggaaaagaattggatacatcgaaacccattcaagaagtatcccccaaaaaatggaagaaagaaaggggacagaagggaggcagaggcaggtggatctctatgagttcgagaccagcctgggtctacaaaagctggttccaggatagcctccaaagccgcagagaaacactgtcttgggggaaaaaagggaggcagaaactaacaaggaaacaagagcaggaatgtgaagggaaaagacattagaaataacatgtgaagattgattaaaataatcagtagaagatgagaaattgatgatgtaagaagtaggaaacattttgggaaccagactttaggatggctgaaaaagtatataatctattccacaaatgaaattagagaggaatataatgattcagttggtattgtgtagacaggggagagtatgggcccagtcactgaaactaaattaatacagttttgcagtatttgtattaaaaatacaataatccctgtctcagcttaatccatgaggttctgcctgtgttggggtgtgtggacctggaagctcttagcaacccagtggtgataaagaccaaacacaggcatcttgtcatcttcagagagctctcagttccatgttgtagaactagagtcatttctttattagccatcttttctgtcccttcttaatcaccctgccaataccacaagggaaccatttctctctttgttctcctctctcttcttaatcatcctgccaataccacaagggaaccatttctctctttgttctcctctctcctctggtagctcacccctaaccttccaaaccatctgtcctcacaagttactcacacacctctcacctttgcccaggtgagggcctattcagatgcttaggccctcagagaagcaaataggaggcattttaccctgaggccatggtaaacaatagtagccctactggcaattaacaatacaatagtgagctggagctttctggtgtcccatgtatacaggagctggaggctgggccccaaaatattccataacagaattatttggtcccccacaaatccccagagactgttgtttttaaatacttggtcccttcccagtggcattcttttaggaggttgtggggactttaagctggaggacctgcccattggaagcagattgctggaggtttgcagggcagccatgcttcccacttatctgtttcctgattgcccaagtacaaaaagtgttagccacatgctcttgggattgtgcatctccaccatgccttccccatcaacatggactatattttctcaaactgtaagccactataacttcaccttgtcgtcagaacctgctgacctgtcgaacagcacttgaaatgagggtatgaggattaaagagacaagacaaagagttacactcaggaggactgtcagtgaatacttccatctggagttcattctcctctgtgcttatatacagttcagaaataggcaacattgttatagactcaggttcaaggaacagttaagccacttcaaaacatcctgttttcaaggaggtaacatgcatgctgttttacttgtcaaaatatctcgtttgtcctgttcggtaaaactagagcaaaacaaggaggcacctttgacccatcagaccaagatggagtcactaaagctccccccaccttcttgtgagttttgtcagatattccatcacagaaatgagagacattgctactaaggaatccatgagtgggttcttctaaactcttagagttcctctataaagttagaggcaaagcaataaatcagcaggtttgctgagagtctgggtgtgggacccacaggaaaagagaggtaagtttactggcaagaataatataacacattgtgctactatcaacaacaggtatcctgactcactcatatgagccaatttttaaatgccaaaagatactcagacaccgttgttaaacataactgttaagtcatatgaaatccaaacaaataatgcattttcaaaacaaaagtaataaatgttcactactgattagttaattacattttgcagtgttgttcttggaattcttcacacaagctgcatctgcatctgcatatctagaatggtgccccactatgactctcttctcaattgtacattcagtgaaatgatacaatgagtttgaaattaatcatgataagggtgttcacaccacagaaattggaaagtacaaaaatcaatgcttcatctcttgtttgcttgcttgcttagactgaagcaatagagaaaatgttaggagtgtggggaaaatgtaaatgtgtgtggcagtggttgttacattgcacaaacacaaagttaagcaactatttgccccatattcaaaaccatccttgggttcagcaaagacacttctgtgacactgacatctggctaaagttcctatgtaaatctccattgttttactttgaccttaattgttaaggtacataaaagtagcaactgacattgatgctggaacaatatcagttcattagctcaaccacaggtagatgacacatgagaactttgtcaagaatgactaaagctactatctctcagtgcaaagtatagtaatgtaagtgtatgttttgttgttttgctttgcattgtttttcgggaagccagcagttaagaactcagcagcttatcatcttctttacaaaaataggaaacatgggcaggagagtcagtcaacaggagactttcacctgtaatacatgctttttctctttgtctatagtttcagaattcctaaatatattatcactgtcatttgtctactcaccattccctttgaaaatagcaatattcaaaagagtggcaacagaaaagacaaaaggacatcagtcagtcccttcttaattccctttgtgacaatacaatattgtacaatttcaatcccccagaggctcactgaatacccaaagtgaagaaaaactccccagaaaagactccaagtattagagttggaatgtgaaatgcccccacaggctcatgtgcatggatacttcctggtctgtgtagggaaaaaggaccagccaaagaaacacaccctgtgcagagccaaagaaacagactttgtccctggaatcagagccggtgaaagaaatacacccaggccctaaaactagagccaaaaggctagaagggatcagtgaaagaaacactcctgaaaccagggccaaatctaaccctaaacctttgcagaaaactaaccaatccttgagcaggagatctagccatcctaagctcaagggattgaaatctgaccaatccccaccctgaaaaaactctacctcctaagaatccctatataaaccctgtgtctgttcagcttgtggctgttacactccgctctccactgtcctggggagcagagctgaacagtaacaacttttcaggggaaactctcccttactggaacagagttgatacactggagaagcctttctctgaagcagggctgtaagctgctgtgcttcctgtgacttatggtattcgttggctcccaagtgccagaatacctttccatccaagctgtaagaccaagtattctgtgattcctgggtgccagaatacctttccatctgagctttaacattcagtattctttggctcccaagtgccataattcatccccatccatcccatccgatctgtcccaaaatgcttacagtctgtccacaatgtaagaagattcaacatgatgccctgaagtgagtgcaccattccctgatggaccaccattcctctaaatcatgagccaaatcaatccttcttcccttaagttgcttctcttgagtactttttcacaaaaattagaattcaatacagaaaattggtattaggagtggagtcattgaaataaatctgaccaggtattccataggttttttgaactgttttgtgggaggaatgtggaagagctcagaggtgctttagaatgccataagcaaaacttaataggtagttctggtgggagtctggaacactaaatggatttgatattatgagaaagacatgagcatgttgagatcagatgcagactgttatggctcaaatatgaaatatctactattggcatatgcacttgggcttttggtccctatatggcggcacagcttcataaagttgtggaaatatacaccaaagcaaagatggtttgtaggaaaacttgatggccatctctaagtctgttcagagagttagctttcagtattgttggactttctgtaaggagggtagatttattgagcttttggactcatccactcgtagtactcatttataagactatgtgagcagtgaaagtattgttagacttaaaagtcacagacttctattctggtgcccccatagatattaaggaatataaagcattaaggaatttggatcaaatgaactttaagtcctttataagtctaaatttcttcccaaatttactcatggtgagcaaggagcatcatgaaacagcaagtaactattcactaccaagagctatgaacaatgttctaaggctgaattttgtctctaaaacccaagaatacagtctactacctcaatcaggctcaatttataaggaaaatatccactagtggttcaaaggaaatgtttgacaacaaatgaaacagacagcagagcatttaagtttcctagtgtaacatgtattagttcaagagtactcaagacaaggcaatttcatcatcacctcactgtccctactgagatgtatcaagattttttttgtgacaaagacaattatggctcacaaaaaaaaaaaaaatcacttgccctttttcatttcccagatgctcttgaaattgtattgccatgtgacaggtttagtactgataacatgctagtagagattaggaaagctaattctaaatctgtccccttgggagccccacaggagctacctctacagtggtaagttcatgagagataataaatgtgcctactacaaactctttattttccacattaaatacaatacctactaactcttgaatttgtcaagcaatatcaaggaatggctaatacgcacaatgaactcagctgccactgctttccccttccttccaaaggacaaacactgaaaatgaagtattacttcatgtgacaatgcatgtaccatgagaatagaatgcatcgctatggtcaattctgtttgatcaaattaaaccataagtaatctcacatcataacttaagagatgtaaagtgaaaaataatgtttatgaatttttgacaaataatagtatgaagaattgtgtatttagtatattctacaaagggctagagaatgatacttcaggttattcattactggttacttattttttaactttttgttcagaataagtctagattaatggaaagtcatataaaaagagatagtaaacagatatagtactgagagtttcttgaaacctttaaccaaggatgacaatttcatgtaacctagtacatgaacaaaaccaggaaatttatatcagaacaatgctgacatagactttactgggaaaacacttctctctctctctctctctctctctctctctctctctctctgtgtgtgtgtgtgtgtgtgtgtgtgtgtgtgtgtctgtgtgtgtgtctgtgtgtctgtgtgtctgtgtgtctgtgtgtgtctgtgtgcctgtgtatctgtgtgtgtttgtgtagggttacaaagttttatgtactctgttcctttgtagatttcatgtaactaccataaaacatacttagactctttttaatttttacccaaacccctccccatctcctagcaatgactattctctatctctatagatttagcatttctgtaatgtcatatagacacaatcataaagtgtgtaaccttttttatattttccttcctcactaaccataatgctattcacccctctccacgttattgcttgtcttaattgtttgggtttttgttttatcttctttttctttttattgatcaatagaattccattatcttgatgtaccagaagtttgtctgacttcacctattgaaggacatttggattctgtccatggaaaagttgtagctaactatgaataacactgttgagaacattaatgtttgggatttacataagcatgggattttatttctctgagaaaaaagccaagatacaattactagagaataagactaatgcatattttattttcaaatgaattgccaggtgacatttctcaatgttaataccacatgccacctgcaatgacaatggaactatgtcctcctggtcatctataccatctggtcttgacctacttttaattttgccatcgagtaggtatatggcaagtctctttgtggtctcatgtgcacattcatgactaatgaacagcttttcgtgcatgtgcccattttcttttcttatattctctttaaggaaatgcaccgtcatgattgttacccattttctgattagattgtttctttattcttgttaaggttcattacattttcttgatacatgctgtttgtttcatatgcttaacaaacatttttacccactactcttattgttaattcctaaaatgtgatttaaatctaagatttctcacaaattcaaatgaatttggatgaagacgctgaaaattagaatataataagggactatatataacagccatttctgaaacaatgagaaattatcattgcattttaggtaggagatgcatgaaggttattgagacccagtgggaaagtgttacatttcagtcagtgtacctgcaactgattgattaactttcaacatcctaaattgaagacaggggaaaacacattgaagtgatttacttagaagttcatcaagcatgtgccaatataataattttttaatccaacaagaaaataggtgtcaataaataagtcattaataagctaaagagtcttatttcctgtgcattgaagcttatttaaagattaagaacggcatcaagggatgcatttctcaaagactaaagggtaatgttaatgtgctataatgtgctaagtgtttactttcaatgacagaaaggtctaatgcaacaaaaactagtgaaagaaaagcattttatcagcaaacagacaaccagaccttgtataatctactaactaaatatcaagaactattatcactgttactaaattaaaaactgataagaaaaagcaaattactttacaagagtggtaaatggatatttgcttattacctgaaaaaaaaacaaaataaccctctagagtggtttcaagaataaaatactttagtaattaaaacaaaattatatttaatggatcagattgtgtatatatgcagataaagcaagaatataatgaagcataatgatgaaaatggaatagagtgttattggtgagacctcatttcatattatcaaactctagacaaacactactaataaagataatgactataacagatgttctcaccttgcattaatgagaaagttaagatcattttaaaattgttctgaggtcacatgttaacttctctacatgtcttgagaactatgtatttcttaaaaatactattcaaatgttaatgtgcttttcccctgctgggaatggaccacagaatagcctgcttgctaggtaagtaccccactctgccttcatccctgtctcaacaagaatctctccgagtcttacaaaaaaagatgcctcttgtatcaaagtaaacctaatttacaaaagtgaagggatgcctggtctccatagcctaaaaccaaaagctattctattattttccaaattttctgaataccaagtacctcatgcttactgctcaatttagaaacaaactggacatccacccatgtctacacaaggagttgaaattaaaagcaacacgaagctgtcaatcaatcaagtttttagaatgccatccaaaaccatccttcagaattcttagaactccatacctatcaataacatactatccaatcatttacccatatttcaaagacacgagtttcagtggtcatatcaattaacccatgttctgccaggattacatagaagggttcattttatcactaaagctgggtaaacaagagttggtgttttaattagcaggatccaaggagaaaacatatatcattttaaaggtcccagtataccctcattaatttattttctggctcttccagatctttttaaaaagctttatgagaggtaactacagaaacacactatgaaacaaattatttttaagatgaaataaacaaaataggtctcttaattgcacaaacagaaaagattcattgatcttgagggaaacttcaaagtcaccatacggccatgtgtgtttccaaaaatgtaattcagacacatgtattgtggtgcagaaatacaagccatccctgagtagagaggaaaggaaagaagaaggggtgtgcagagagagagaggtatctgttcaggttctgcagggtggatgctgtccactctttctttgggggaaatttcaggtttgttggctaatttgctttcgttttatttttttatcttttgatgatatttctggtcattgaaagtttgacttaaaaaaaaatcttcagttcgttttggaaaagaacctggactagatttctaattgttcctatagtctggtttccaaaggtgattaagccagagtacacagatgtgggcctgcaaggttgtatcccacaaaaccttgtgtggttccctcaagaaagaagcagtgcaatgttgacatcttgggcctttcataaaacaggcccaggactccctgctctctctgagtgatgtggtaactgagctcaggtcccacagcaacttgcccacagacctaatgggggtgtcaggctggagcgggtccaggccagaggccaaatcagaactgtgaaatgtagagcagtcaagtctcatagttcattgttaattaattcccacggtgtttcccttcatctctgtgaacttatggtatagccctaataaaacctatgcttgatctcaactctgtgtgaaagctctgacctaaataaagaacaaggacataaaaggcaaggcagcccccatttggactagaacatcaggtcctagaagacagaagtcttctaaggatgatgggaccttgatgtagaagcaccagtcagtatacaagcctccccacaaggaaatggctaaagagaggactatataagggcccagtatcctaaagtatctcaggaaccaaacatctacaaactcatggtcagtggataattttatttacaaagaactgcaggctgacatgtatatatttatgggcatttttattgtcactgggtcttttgctttgctttcaattaatttttttcagttggcatactaagtaatggatttcattatggcatagtgtgtgtgtgcatgtgtgtatgtatgttcaagctgtgtgtggtggggacacgtgtgtgaatgcctttgtacttgtgggcagataagtcctcacacttacacaccagtcattacccatggagtcatcttccagtactttgctttgtttcatattatggcacttgtatacacatgtcagtatactttgttcactgtcacccttccctactgcccctccacgttcttgctgatcccttcctccctcaacattctgtatattccatggccctctctttccctgaccccctgaaggtttcctcctcccctctcatgagcttctttctacttccatcacatgtagatgcacacagacacagacacacacacatacacacacacaattcattttgcatacaaaagttgtggtatttatttacatatgctttctttgtcttaatataatggtctctactttcattcattttcctacaagtacaatgatttcattttttctttataactgtatcatactcgatgtgtatagggggtggcatgggctgagatcccagaaatgtagtttcactgtcatagagttgaagttggctgggctgtgttccctccagacactgacagggattctgtgccctgcctcttccagatcctggtggctgccagaactccttggcttgttccctcatcccttcaatgccttctttcttttaaacaggattttatgtgaagtctacctatgcttttcccataaagtatgcatgtgattacattaagatctacccagatgagccaggacaatctccccactccaagacactttaattaatcccagtatggagatcctttttcctctgttttccatataaaggaacattgaaaggcttggggcttgaggcaggatattagagggagaccactttttagtagaacagacagaagactgcagtggaggcagactatgaggcatgggcaaacattcagaagcatgagaggactttggagacagcagagttcaatgtggctgggctgctgtctacaagatgggacttggaaaagaaaaggtcagaagggaaggatgctccttctatataaaagagatttggcatggtgcttcctcctgtgcactgagtcctgggttcaatccccagcaccatataacacaggcatggctaagtgtgcccataactctagccaagcctagcttacaagagaccatgtttcaagatatatatatatatatatatatatatatatatatatatatatannnnnnnnnnnnnnnnnnnnnnnnnnnnnnnnnnnnnnnnnnnnnnnnnnnnnnnnnnnnnnnnnnnnnnnnnnnnnnnnnnnnnnnnnnnnnnnnnnnnnnnnnnnnnnnnnnnnnnnnnnnnnnnnnnnnnnnnnnnnnnnnnnnnnnnnnnnnnnnnnnnnnnnnnnnnnnnnnnnnnnnnnnnnnnnnnnnntcgaaaatatctaaaggtgacttttgtgcttcgaatgaactgggacacataggcatcctgtggagctctgtactcacaaatgagcagattgcagagaagcaccggtcccactcatccacagcaatcacacacacacacacacacacacacacacacacacacacacacacacacaacacacacacacacacacacacacacacaaacacacacacgcacacgcacgtgcacacgcatgcacacgcacacataaagagcagcagctgaagggtctaagtatcaacattgtttttcccttaatgtcttggatttctttgggtaagaaagtaagaggataataggctcaaaagtgggcagaggagaatgagaggcatgagagatgcagagagagttatgggagtaagttcatccactcagtgagtacttgccaagcacctaccacacatgtgccaggaaccatccacattgtgcacaaaacagcaaagagcaagatatgagaaacttatgttcttgaagcttggcgttgacatttttgtgtcgtaatataggctctgctccatgctaggctcttacttttattctctttaggcctcacagaaggggccaggaaatatggattgtatgccctcatgaacaaggcagaagcagaaatgtagttgatccatctgaaacgttcctggatgtccattccccatagaagtctgttctctacagctattcgtttcagacttcagtgtgcagtcagatgttctcccaaaactctaaccaaggaaagcagaagagtcccaaggataaaacagaggggcgttcctgagtgtgaccagcactgttggccatgttaagctacgtggacttggctggatactcatggttatttatagagcaagtaagctctaaaataagctgcaactgcagatggctgggccagatgatctttcatggtcccttccaactccatttattttgtgattttttatttttatttttaatttttgtcccagtgtatatcacaaggactaacaagtggactgttattaagaataagaaaacaggacaaaagatttcttgtcataacatcaattgcatgataagaaggtacaaatgtatctttaaaggaggaagtaattgcattcctgatttgagaactcctaattatccaagaacgtcttcagtgagttgtactgaaggtgatttctacaaccaaaaaaaccacaaaggacccggagacatgagaataacccccttgttttatagaaaaagaaactgtgtcctaaagaggcaatatggaatgtgatgtttcctgttcgtccaatggccacttataaaaaaaaagtattcaaatcattttaatacagattttagtttccactaaacaactcatagaaaattctagacccagtaaaatgttaaaatagatgcatgtgatgtactaaatgcatatgatttgtgatcatggtggaatttttatataaattcacataaaaattaatgattatctattgagacaagttctcctaactcattagatagacccaggagctagttaactcttttacaacaagaatacaatactgaagtaaattatagtctccatggtatattatattacatcttacttaaataatttccaaggaaacgtacattaaatctggagcttggcccatatttgaatttcccttgggattcaaggaatcatctggcaaagaaatgtcccagctagaaatttcatccatctgcataatcataaggaaaatgtcttatttgaggtataaaaggattaagtagttttgggggatggggtcctaggcactgttgcttttagaaggaacatgagaattttcagtgaagaaatatcttcatcaatttgaagaataagcatccactcagttgctgctttacttatgtccagagtggaaataaagcatcgagtacaccagactccaacactcagtgaccatggaagacaaaaggcatctctcctccataaacatcattgaactattctgaagaccacatggttttaaagagtcacaatgtatggcctccttagaaaaccaagagaaggaatacagagttctcacaagtacactgattctgtgaggtagcaatactatacttagttggacatagccatttcacaatgtatttcatacttcagaatatcatgttgtatacaataaatgcacataattgtgtatgccatataaaataagctaatagagataatgggatggctcaacagatagaggtgtttatagaggcctgatgacttgagtttgattcctgagttccacaaggtgacagaagaaactcccaaaagttgttgtttgctgcctgctcgctctctctctctctctctctctctctctctctctctctctctctctctctctctctctctctctctctctctctctctctctctctgacacacacacacatattaataaataaataaaataagcaagtatctttgtaaaggaagttcagtctctcttctccctactaaacaaaacaatatgccaaacattccataaatcatatcaaacatcttacaaacataactagaaagattatatttttccatcactccagcagcctcttgctcaataacctttatttagctatggtctctcttcactccaatgcaaaaagtagaagggacagccaggcatcagccttgcagaaaatctattattacctccccaggaagcatcagtctttatttatgaagaaaatcaatgtccacaaaagcctcttagcaaaagccttaggagagaaagatacattattactgtgataaaataactttgggttgaagagaacagtaaagaaattaacatttatcgagttcttataattagctgatacttgacatactcatttaatcctcactaaaatacctctgtgtgcccacttgggggtggcggcgggaggggggactttacaatagtccacaccataaataataaaagcccaggtttctcttccaccatgtttgtgtccccatatcaccacctagagatttttctcatcaaataatgcaaacggggtgatgaaacaagctttcagaatatgaacagccaccttctctcttcactgggacaaaatatgtgcatgaagaaatgtgaaattcttgtagttgtgattacaagttagtttcagaattatttacctgtgggtttcaagaattctgtggtcatgaatttccagccatcagtaaggaaagtcccagatggctccttccacctcccattctgtgacccttgccatatcaaaccttttgtttgtcttatgaggagactaatatttgctggaagttcccctgagggcgttagagttaagcagggatgtacatgctctctgaatgaatttccctcagcattaatagaacacctaacaagacaacaaagacttgtgacttaagagagcttctagctgttagggagtctattgacctctacccaggccctcgggtagatgaaattatacagtctctgtcacaagtttaagcatggtgctttacacatttgttccaagaaagattttcacaaaatggaatgcacacaagaaagatcttttgggaatgctttcaacaattatatttggtataatgtttattgttactactgaaagagtaacaaagtcagaaattatagtatgtgtaaacaaacttatggaactgcttcagatgttgtgtgatagagcacaccaagccaatagtgtgaggggtgtgtgctcacacaagtgtaagtggggggggggtgattgcgtttccatacattgttattctgcgagagagtaaatgccaatgactaatcatggaaactgcttctcaaagtattttctctgtgcttccagatcacagccagctgaaatgaaggcatttgtgggcacgtttggattgcagaagtaaaaatagaatatggtcagatttggtcatggagaggcacaggtgctcaacatgccttctgtttcctctgttggacttctatgtctccttcctggctgctgatactgtatttgaccttacagtgccccagcctcacaaccatagaaaatgaaccagaggcaataactgctccaggcttgtccttcagctctgaccactactgtaaggactgggcatggaagccctggttgaacaacccccagggcttcatggtgacttgggagtcttccctgatgctggactttcatttcccaaccttcatttctccagattctttcatagttggtaaggaccaactcctattttctgtattctttttaaattgctgccatcaatcaagccctggaccatatacatactagatggtactctaccactgagtttcaatcccaacaccttttattttcttactttatatacgttgctcttttccaagtggatttggctgacatggttatcaaataattataattcattatcacttaaaagattaaacaataaatttgatcagaatttagtttttggaagtgagtgtctgggccatcttctacatccttaatacctagcactgtctcagacacaaaaatgcatgcttaatattggtcaagtggaaaaggaataacctttagataacttaaaattttgctccacccaacagatttaatactctataattcagggaaatgaccctaaatatcaaaggctctttttattggccatttaggtaacaagaactgaaactcttgtcaatgacaacaacaggctcctcttgtgaggaagacagacactgcttctgctgatctctccaggtatcagcttactaccacacaactccacacatccctgatgcctattccaaacttcttggtgcctgagttctctgtccacgatgagaaagtgaattaaacagatatgctcagcaagttccatatccacctgtctttccccagcttcagcctgtccccacaggatgatgggaagacgggaaacttcatgcttatttttctctaccctcaactttgcaaagactcacgccacaacctccaaaagcagccttatgtcttagtcacttccataacagtggaacttttatcttcattacttaccagcacttaaaagtaaagaggttttacattaaaattgagacgaccagtgtgccttaaaatagcttatataccaaaatagaagtaaatagcccaagtgaggagctggcttgatccaagctttacctgccacttagcgtcatgcttaccctgtgatttacctgactatggggtaaagagatgtgaactatttcctagacttgtagctgaccctgtacttagtattctcctacctgtaaatgtaatacccatctggtcattgtagtcgtgcatattatgatgatgacctaagtccaatcaatatgtacacaggctgtctaaaggcggggaaggattgtgtctcccatgtaggttaaagagaccatcctgaggaaggggcagatgaggtcaatggttttcaaagagaacactggaaagagtattagcagtcgatgttgctggaacattcactgaacagtagttctggagaagcaatggaagactggccttctacaaggtgtcgcatggagctaggagtgaaggtcaaatggtgtcttgtcaagattgtggaagttgttttctattatgtaaaagaatgaacccccaaaattcactaatattgcaatttcattcataatgagtgatatttgatcatgcctctgagtaaaaagagtttgtaccagacatctgaaatttgtcccgacagagccacactcctccgtcctttattctgacccttgttgactagtagataacagcagtagctacctgagtcctaccttccagccaggttcaatcacaagggagctgggtgctgctgtgaataaaggaaagggttcctttgctgcaaggtcatctcaagttcattgcctctccccatccaaaactgatcacagttcccaaagagactaaagcttcagagctcagtgctgtccctatgttctgcagcctaagggtgcttatggctttgcttctgacagacccaaatcctaacagcattccctatggttgtttcatagcataccttttaaaatagatcctttaaattaataaagaattccttgccgacttaacctatttcaagtataccatctgcttcctatggggactctgactgaatcagccccaatagagtaaaacagttcacactgttaccctaagaaaagcagcactatgatgacaagtgaccatggagcttcaaacccaggggttcacttgcttagagtggaggttgtaagtcagacaggaattgaactggtaaagatttgaaacatggaattctattcaacaagaagatttaaagagtaattttctactaagagagaaaaaaagtaagggaaacagaaaagggaaattgagatgggggggtcctagaactacacagaaagttacagagaagtacattgggtcttttaataggttgggacaaggcatgctctggctctggcccataaaaggcttccacacagcagttgtacactcacagtgtaacatgggcttcaagacattgtctactggtacatagaccattacacacagccctttagatcctgcatccttgagagtccttgagggatgcatactgtttgtggagtacatggcatgatccagtgggattcatatgagtctggaaaagggaacaaaagaagagctagttacatagttcaagctgaccttgatccttctgcctcatgatccttctgcctcagcttttggactgataggattacacgcatatgcccaggcaccaggcttggagtctatattttcttatatcacattaatactctgatactaaagctaagctagttcctgggttcttctcaaagataacaagccatgaacatgggacatctctacccatacgtcaaccctagaaggcatcatcttctggtttttgtcctattctatccatctccagagtagatgatgacctacatctgctggagaggccgatttcctagtcaaatgtttattcatgcaaaaacaccttcagacacattcaataacagtgcttaatctgggccactcaccacttttctccttcattcatgaagtcaataaaatctgtagcacgtaatgattttatgttgtatgagaagtatgattctgcctcttaacgactaacatgtaacaggatgagaattcattacagtggcttgtacaagggagaaggtaaggtcagtgtgtgcccaagtggctgtgcagggggaaagttatatttcagatatggacactaatcacccgggaacatcctgactccaggccagtttttgcagtttcttaaatagatcgtatattccagtgtaaagttcttcctgtggctgttttgggcttgctattgtttataaggtgcctctggagacagaactcaggctctgtgtatgctatgcaagcactccaccactaatttggaccctttacagtttgggttccaaatgtcctctgaagtttgtatgagaaaggcttggacactaacccgtaataccattgtaaatgatgcagccttccagaagtgagacctagtggaaggaagtgaagccattgaaagcatgtccttgaagggtctattaggaccccaagaccacagaccataccctccctctccttcctggatgccataaacactttctctaccacacactctctcatcatgatagactgccctgtcgtagcaccaaggtcaagcaaccatcaacagaaacctctgaacctgtgagctcaaataaatgcttcctcttctaagttgattggcccagatattttgtcactatgcttgatacccagctaagccatatgccctaatccacaaataccttgttttataaatcttttagaaaatcaccaaaaggtatgtaacaaagtatcttcctggataatcattttcaactggatagcggtagcgttagccattgttatcaagatttttaatgtactattctacatttttaaagtgtatacaaggaaacaagaatatagattctcactcaccatgtttttacacaaaagagctcacagagagacatgacgtacacactgtggtctgccttttatttttcacctcacaataaatctccaagctctcttcttatcagcgcacgaggctcctccattctttattacagagccattgtatttcgttaaatggatgagccacactttatttaaccgacctgctccattgacgggcacttgggttgtttctaatctttggcttcatagcactatattgagctcttagataataacaagaaaaaggaaaggaagagacaggagaaagagatggaatcagaaatgagaaagtgctgtcagtggcacaaaggccagcgagctcatgtggggtaggaaaggctggatgaagtgaaggatagtgacaacaaagatcagctgtcctctccaccaaccctaacgttttcctttgaagggttcatgttgcaataagagtagactggtaaacattgtgttttctctgaaaagttggatcatcagcatgaattagccattagaggggtttctataaacatgattaaaatactggggtctccgtcacttcttctaaaaacaaaaattcattccaatcagccagtgctttatttccagaaataaaatactaaccttctccaaattcaacactccctctaaagccatgggctgtagttgggcagttgcagctgtgagggccacaaggggctgactcccagggccacagcccagaaaatgccaagcctgatttgtaatcctcccttcgttcccatccctccagggctaaaatgcccagctgcctctttctaacaaaaatttatttttatcaaggaagcaccatattcgctcagctctagagaaagcaggtctgagctgcagagaccaaatgattgttctcatttgcacaactgcttcgagagaaaatgagattaccagcatcaaggggaaatttaaaaattttccccaggcaagaagaattgacgtcctctgttccaagatgaaggtaggggggaattactgctccacctagctggagcctaataaagccgggcaactggcatgctcatgtgcccatgaacccagaaattctctgtgctgtgatttatgcaaacgtgttaattcataatttaaaagtaattgggatcatcttaatggccttttcttcctgttagcctgcctcagtggaagacccctgtcacatcaattgtggacgttaatacatcaatcccaatgattttattgtcttaaaaataacttagctgctatagcagctgccatggggagcctggtctccaaggaggaaggtttctaaccgtcagtccagtctcatcccccagttactgacatgcagaaaaagaaacattcacttttaataatagggctctctttcatgcaagaaaagtagaggatttctaaaaataaataattcatgctcctccaagctcccagagaataaatttgttccttttctgttttgtttttcttcaagatatgacatcttaggaagaaggggctgagggggagacagcactttctgcttctgtggatagaaacatgcagagtgtttcattccctggtgcaacaaagcctcaagatcaacagacaagagctgaaaaccttttcccaccagacagacagcgccatctaaatgttctctccaaagacagcgctgcacagacgggcgcacagaggcatgtcagttttccctttatgtgcacacacaacccttttcaaaagaaaagagaagagaaaagaaaaacaacgccatacccaaatcctgcacacaattaattacactgtgctgaccacatgaccagtagttctgtgtttacagtttcaggttttttatgtgttttgattcatttgtcattaaaagaacatgagtttctaatataccatcccctgatatttctcaaacaacagtccatctgcaaataacaaaaaaaaattaactaatacaaatttctgaccattactttcccaaattcttattggctttgtctggtataggtccaggtaatgctggtctacttaaactgtttgggaggcactcatataatgttgatgaaatatggcttgacgataaatacatataacaatttcctccctgatacaataacattggtcattcctgaaaattgactttttgtccctctgtgcccttcaatggattgttcttttgaaggcaattgtatatttgggcctggggaatggtgctgttggcttataattgctgatcaaactgaagcagaagtatagaaatatcataaaatctaagctcctgagatattgattcaaaactttgagaaggaagggcaagcaacaggttcatcaaaagctggtggaagctctgtactcttttccagccaaaagaaggggggtagaggagaggaaaggcaacaagggaaggaagcacttcaacacaaattttatacaattctgagggtcactgagctcagagcagaagccagtgccatcatagtcttctgtgttcctaggtcacagagtcaaggagagctttgtattagtgctcagcaatgagaaagaagtatgctctgtgacactatggggaatacaactaaatgattcacaaatcgggaattagatattccaaacacaagaaacaaaacttgttagcaagcatgtaagggccaagatgtctagtgcaaaatcaagcctaacagctaatcatttcacataagccatggcaacagatacttttaaattctaaagtgtaagcatttggggctagagagatggctcagaagttaagagtgcatgctgccctttgtaaaggaccaaagtgtggttcccatcaaccatactgtgcacttcacaatcacccatagctccaagtccaagggatctgattccttcttctggcctccaggggcaccacactcacaggcagaacctacacacacacacacacacacacacacacacacaccacattattaaaaatagtacaaacaaagaaggaacatagtaggactagcatagggaagggatgaagatttgtaatttgagtttcaaaagaatcttcccaaaataaagctcaagcccttggattgcccattccttaattctgcattctgttatgtctttgtgacaattccccaggtgagtcactggcatcacacaaagcaattctccacaaagtagaacaaggtcagggcagagccagaatttctatgcagatattaaggttgctcatcctattttatctatctgattgcacaattagaggaatggtgagatcatgtctacaaggcaacctgagcctgcaaagaaaggtattataataatgtgtagcattgcttcatcagcttcagatggcctatcactgctatctgtttatttaagagtgctaggagaaaccaataaatgccttcttcaaaaagacattgtctatataatgcacacatagattgagtgtcccttacccagaatgcatgggaccagaagtgcttgggggatttttcataatttggaatgcttatatatacacaatgagatgtattagaggtagaccccaagtctaaacatgaaattcacttatggttcacatacaacttttatgcatagcctgaagatgatttcatccaacattttgaacttacttgtattttaacaccagcttagcatgtgaggtcaggtatggaatgttacaattgcagcaaccaggcagcactcaagagaattggactttgcagcatttctggctctaagtttgcagattaggaatgcccaagctatgtaacatatagaaataactaataacaaatgaagtcaatatataccaaatacaaaactcaaggacttttgaagggcccagaaaaagaaaactaaagaagccagaaatgccaattagatggaaagacaggggctaggaatgtacctcagtctacagaatgttttatctatacaagtacacataggccctggattcgatccccatagccatataaactatatttgctggttgtgctggtttgaaagagcatggctcccatgggcttatagactgaatacttggtcaccagggagtggtgctgtttgaaaggatgaagaggtgcagccttcttgtaggaagtatatcactgggggtgggctttgagatctcaaaaagcccattctaagccttgagtctcttcctacagcctgaagatccagatgtagaactattctcagctactgttccagcacctgtgtgctgccatgcttcctaccaatgttaataatgcactacacccctgaaactgtaagccagctccaatgaaatgctttctcctataagagttgccatggtcattgtttctccttgcagcaatagaacactttagtcagttctattgaggggggcatgactataataccagcacttcggaggtggagacacaaaggtcagaagttcatggttacacttggctatgtaaggggttcaaggccagcctgcgcttcatgagacctggtatcaaaaacacaaaaagaggggctggaaaaatggctgagtggttaagaacatgcagtgctcttgcagaggacatgagttcagttcccagcacctacttcagccagcttgcaaccacctgtaactccacttccaggacatctgatacctctggcttcagcagatgctcacacccctgtcacacagatacagacagacacacatacacgcacacacacacacacacacacacacacacacacacaagagagagagagagagagagagagaaatacaaacaaagcaaatcttataaacaattatttcaaaagttaaaggaaggcagggtagaggaaggacaattaacctgtactttattcagttgcctcctgctaaggaaaaagacgaaacacaaagtttatgtacatgaggtggtgatttgtttgtgggttagtaataagggtcattttgtgtggctttacctggcttcactcctatgtctgggactgaaaatggagaacgttgaatatctgggacaactcaagttttagggtctctctccacttgtctctcatccttcaacaggcagggctctgaaggatcaaagcaaaagcctcaaagcttcgtatagccttggttgagacctcatggtcttcattgacacttcattgtgtcaatcaaaagaagccacaggccagcctagaggcagacaccagcaaatacacacttgtcacaagagggattgcaaattatttgtggtcgctttaatcaaccaaaaaatactatccatgaacctgtacaccatgcaacgctagcttcttttaaattaggaaagactgtttcattacgactatcggcctgaatgcaaaaaaaaaaaaaaattcatgtcaagtaagacattgatcccacagcatttattaaaaatggagaggccaggcacacacctttaatcccagcacttgggaggcagaggcaggcagatttctgtgagtttgaggccaacctggtctccagagtgagtgtcaggataggctccaaagctacacagagaaaccctgtctcaaaaaaaaaaaaaaaaaaaaggagagtattttttaaaaaaatgttttccagtgagataataaaatgtctttttgaaatcttttccttctgtctctactggaaagagaaagaagaggacagaagcaagaatgcttgcagtccagcagactcagagatatgtgtatgaactctaccatgccaggagcttgcttcatgatgctctgaatgatacagcccattataacagagggtaaaggacagtgtgccagttcacctgtgcatcttttctgggcttaacaccgcaggcacaccatgcacacaagagcacagataaaaacacacatatgtaaatgtacattcaggaggagggaaaaaatactcagaaacctatataactgttgggaaaactgtaactcattaaagaatttactagtagctgtattctatggtttttatttccaaaactaattattcaagtaaatacttttaacactaaatcttttctttcattattgtggaaccctttaatagcccacttatggtgatcacaaaaggcacccttccaaagagtttctctacaagaacacttaaaagcagtaattccaaatttgattgtcccaccatgagtaggccataaaaacaaaattatagaattctcaaaatgcaaggagctaagtctagttgggtttttatatgtactattgtgtcttgtgtttatgaaaatctgttttcaaagattgttaagtcattgcctggtgatgtttatttgtatttagtatctacttatgaaaactgaaagctaaacttatcacggaatttttgctttccaaagctgagtcataaattgatggtagactcactgctatgttcttattgatagatgatagattaacagatgggagctcagataatggggaaacttgatcaaaatgcttcttccaaaagcaagaaaaacttctccacttaaagaaatacactgtggaggctggaatgctttaaatcaaacccagaaagcagatatatcttctcacagttatgataaggtgttagagagctaatttactctcttatttgaaacaatggggtgaaatagaaaacaggaaaatgcatgaaaaaataaaacaacatgaggcaatgcatgaatttggggataaggaaaataaaggaagaaagcccttgatactctacctaacaaactaaagagagaatccaggctgggcatagagaacaccccaggaagaagtctgcattgtggaatatatctcaaaatccaagtaaagatgaagtggtagagttcatggaccagtacaccagagaacagaccactagctgtataaaccaacaacagataccagcagagttcatcgcttgaatttcccaaatagaactggccacccatgtgacagaaaactatctgaggctaaggaaaaacagaaaatccttaaggtacccaagaaaatgtcctttggaattcacaccagataaacactaatgtcttcccaacagccagcagaatgtcactaaaaacatgaactgtaccatggaggatctagaaccactgcctaggtattgaagaaagtttaaacacagcttttgggctgtctaacaaggcttggacacaatctgaaaagacaaaactttgtccaagtgatctaactgcattctaaaatagatacagagtacgtatggcattttcaaatttatccagaaacaacaagaaaaatgcctcccattttcaaaaatggccaagcatgatgctcagtattgtacacagtctcttgctggtatttgttgccctcagaggccttgaggatagctttttccaaagtgtctcaggccttctgttactcccagcctacgctcctcacaatcatgcaggttgcctttggaaagccccagggcactagtgtccagagttcacactatccaagtcatcatgttcatctgtacctagctataggacaaggagaatatgattaggcatcgacagaaggccaagcccaagatctagaataatacctcttaaagtcatggggtttacctagattaatacaaataaatttgaaagcatggtgctgaaaagtggcccaaatcagctgactgtggctttttacacatatatttccttggacacaggcaggacctttgttgatgagtgactcccagtgctcagcctgccccttagtcatccccatttgtacaaaatgagaaaatgtacaaggtattgaaagacaaagtcatggttgagatactttgaatgagaatggcccccacaggttcgtatattgaatgttgggggcccagtttgctggactatttaggaaagattaggaggtgtggccttatcggaggaggtatagtcttattggaggaggtgtggccttgttggaggagctgtgacctggggatgggctttgaggtttcaaaagcccatgccaggctgtgtctcactctcattatttctcctgcctttggaccaggatgaaagctttcaactactgctctaccaccgtgtctgcctgctcaccgctatgatgatcatggactcagctgctgaaactgtaagcaagatcccaattaaatgctttcttttataagttgccttggtcatggtgtctcttcacagcaatataacagtaactaagaaaatgatttacgaagaagaagagaaaaattagaaaaaaatactgacctagaaataatagtttttaggttagctgacaggtatattaaaattattactgtgagtctatcccatacttcagagagctagagaaacatctacatattaaaaacaaaataaaaccaccagagataaaaaataaaatgactaagataaagaatacatcaaatgagaggagaaaagaaatagaaaaaatttagataattgttgaattttctacacttgctaaaaacataaatatatggatctgagccctgagccttaaaacatagatacacaaaggtgcagcatgctaaattgcttaaagccagctatgaagaaaatagttaaaaatacccagaatataaagaattttatagagtgaggaaaaataagaatgtaagggtcttccccttgttaagggacttgcccttgaaaacatgcagtcagaaaataacagagtactataatgaaacatgaaaagataaatagaagtcaatctacaattccatgctcaaaatatgaaggtaaaataaagaattttcagggggctggagagatggctcagggcctgaggagatggctgggtagctacagaaatggttctagagttgggaggatggcttggaggctacagagatagcttagcagttaaaatgtgtgctgttccttcacagcactaacagtctgattcccaaaatctgccttgtgcagctcacaacctcctgtaactacagctccaggggaatccaaggttctcttttggcctctgtgggcacccacaagtacatgcacataaacacaagtgtacatgtgtatgcatacatgtgtgcccacacacaaattagttaagtagttaattaattaacttattgaaaattttgaaagaaataatattgagactggaatgaactcatcattggaagaccttctctacaagaaatattaaagaatgatgtctaggctgagggaaaagaacagccaatggaaacccagatctacacaaaggaaggatgagttctagaaatcagatgtatatacagaaggatgaagattctcatcttagttctgaagtggtcttcaaatctgactaaagtgaaaatggtaacaatgctttgcagtttgtgacactgcagaaccttacctacacaggttagaaatggaagcatattgctggaagtctcttttacatacataaagtaacgtggttatcagttggtgagaaacaaggttggtgtatattatgaaccatgcatcaaacactgaaaattcagacaaacaatgagatctggcaatccaaccaaggagacaaagtgaaattatgtcactaaaaacaatgtgaaagaaagtgagagacagaacaaagatctcatggcactaagagaaaacagatgcagtgaggtggtagatcttaagacaactatatcaatgatcatatcagctggaaatggctcaaatgtcccaacaaaagatgaaagtggttcaactcgatattaaaaaatgtaaaagccattattataaaaaagccattgttattcatactcaatcatatttccataatataattattatttccataagaagcccaatttaagaatcagaatagaaataggttaaaaagaatggaggataaccattaataatagcagttaaatcatatgaacaacctgacaaggttttatctaagaagatcttgcaggctgtcaataggaactgggggtaaaattacctgccaccaagcctgacagcctgagttcaatccctgagacccacatggtagaaaaagaaccagctcccacaagttgtcctctggcctccacacacgtggaatggtgtacatgcattcacatacccaaacacttccctacatatacacatgacaaataaattaatttaattcttaaaagtagaagtacttgctactttcatgtttaaaattaatatcttagatgccttttctctttgattttagaactacctgtaaagttgatgattacacagtcacacctttgtggtgataggggaatgaaagctgaaattaggagatgaaaatgtctttttgtatttatttcttttctttgggctttttattttctgttgactgaacagcaaaagaaagcagcaacataatcttgaggtctttttgctcagtacaccaaccacatcatcgatccactatcacggagtatataaagcaatgtttgcttcagtggctttaagcttccctccaaataaacagaaataggattgaaaacagacgcctacaatggtaaatttaagggaaaatgcactttaagttggttctatttccccactctgtatctcttacaaataatgcagctggattgaaatgttttcttatgcaagaatgctgaatattgttggtgaattcaaagttttctgtagagttattgtttaaggacattcggtccctgtgcaaagatagggtgacgtttaaaaatagctaaaagcataaatacccaacaacatggcctgtgcttcatttaactatggtctattttcttgtgacctaagaggctcatcagtccttctaaaattggtaagcatgcagtgaggccagggttgcaggatgtgaagcagtgcaaggaaccagatgtagttcagctggaagcagaactgaaataaaaatacagtgtccccacatgtctgaatatgtctgaagagatactgaaactgaacaagggaagggatcccagcagctggacctcagatacaagaaagaagaaatggtgaagagaacatgatgtgtccatggggtgaatccatgttgccactggcattgactagacaaaaagacaaaagaagacatttgctttcaggggacagttcaccgtaagtagggaagttgaagaaaagtacagtgaggtacagcttctaaatggccctcaagcacaccccaagcacaaccccttcagcatccaatggagaatgaaaggcttccattcctttaagaactgatcagtttggaggtaagctgttacccatcttcagccctagactaagaatactgcatgtctagtgagtatccagatgagcaaagagaaagaataccaacagcaaagactgtgagaggaacagtggtcaaggggaacttttaaaaatctgattctcagcctgcatcaacctacaagttaatatactaatatgcattctatacctaagaaacaaggtgctggtcatttaaatatagaccaaagtcaaatccttgggaccagtaatgtataaacaagagatggtctaacaccaaagcccaagctggcttcattaaaccacagagtacggatccttgaaggctcccatagagtatttatggaaattagatggacaatgggcagttgcccgctgtatttggagatgattcgtcttctgtgataaaagaaatgaagttagaacccctccccaggtgcaaagggcatgaaggcataagtagaatcacaggcaggctacaagaaagacaaaagcacagagaatatagtttactggtacatggccacacctgagtcttgggtacataaaatcttattgtcagcctaatgtgaacaaaaaaaaagctcctgcctaaataatcccttatgataacaacagctgttaagtgtttactatgctttatatctctaataagcacagtaaatgtatcattatggtcttcacagccacaagtagatccagtctcaacctatttaaagataagggtctttaaccgagggtccaagttaaaccctttgcaaccaactctagctctgccttctgtctaattccagatgctaactacagacctgtgctacttctcttgaaactagccctaaaataattttgggggcatagtcaattcaagaagaccaaattaaagaactacatcattcaatttcaggaaactgctagaagaaatattttccctatgaaccagcaaaagggaggagaggagaaacacaaataaaagggaggaaaagggaacagtgggggttaattttaaatgtcaacctgccacaacttgagcatcatctttgacgagaatctcaatcaattgtctgtcaacttggtctatagtcatgtctgtaagtgatattcttgattatcagttgatgtaggagactcgccccattgtgagtggtagaatccccaccctttagatgacaaagataacttgaaggaggtggcatttatttaggtgcatggtttcataaggtttggaccataatgacagtgaggttgtcagaccagagagttagcagagatcagaaagcaaagggtcccgctacagttttcacgcattcccctttatttcccctttactccagatatacctctgccagaccatgggaggacaagatgggccctccttgcagttcaacctctggaaatgcgctcttaggaacaccctggagtgcaccgcagtctcctgggtgattttaaaaccagtcaagctgacaatgaagactaaaacatagcataaagatacatcattacatttggcaaatgcttggctgagccatgcatgcttaagatggagaaacaagtaaaggaagagaagaaaataaggaagaggggagaaaagggggaaacatcacagtagcctaaggaagaaagataggaaaagaaatagtgacactgccaaaaagctgggctggcacagatgtagcacatggacgtggggaagaaagcaaaaggagctgacttacagagacctcaggacgactgtgactgtgacctttccagaatgttgatatcgaatcattaatccctctaaaatctgcctccatcttcctagctcaccgacatcatctgagatcaggccctcacagcattttatcagaacaatggtctatcccacccattcctccattccttgactcaccaaacccaatcggtcattcaaacccatgtcaaatgagggatcaacctgctcctgtgttaaaattccttcctcggctctctgtatcctcatgatgaagtcaagtccctggtttttctgatactgtccccagtccacttacagcttcagcttgtgctgtgcccttgtataacctacgttccattaatagctaaaatattttctgttcgaggtgatccaggatcttttataccactgtgttttcccacaagcatgaaaatcaaccccccccccccgtctctatctggttcattactactatccatggaggatgtacccaaagttaactctttcccatcccattgtcccctcctgctgcacctatgcacatcattgtcagcctacccctgtctcccttactggcctcttgctggagtctagcacacacaagagacacaaggcattattaatttatatctaggatagtaattgacacatctaagcaggtgctgtgtgattcctgagataaggcactagcaagcacaccatttcagagatagtgagcagactcttgctctcccttgcttgtagcccatggctgtttgtgtagttcccatgtgacatggtggtgttaagaactaaacacaacattatgaagatagtgatatttgctgaccctgtgtgggtcaatatttagaagctgcagcacaaagctgactttcacttgacttaatgtcaaacaaaatgtcatattttctttgcttagttttgggaggtgtttcagtttatttgttttgggagtttggggaagggggaaaatgaaattatttatagccagtttttcactctgctcttcatttggcttttttttttcagttaaggctcaatatgatatttttatctcattagtaaaccttattgatttagatccataattctgtcaataacaacattctgcattctaaagctatcattcagaaggttattgagacatatttgcatattaggcaagcatacattttagctttacaaatatatacatataaaaacacattatatatctcatagtcattggtagacaaaggacatttgccacagaaacatgaagtacaccactccctaacttcctctagctcaactactgcactgtaccttatccctccattgaaattcttcaacttagacttaccagccattctagcattcttcatgaagatctggagggaaaaaaatctacaacctgatttgcaagtgttatttaactcacgtaatctacaaatattaataagtgctactcaagattagttaagctggcttgtgcttgatgaatgcaacacccttccacatctccatcaccccagtccatctccaaaactactgaacaagcatcttgattaagccttggcttcccatttcctaaaaaatggtatatttcaagcacctccctttctagatttcaagatgtattttataatcactttaagaaatatcttagttatcaggggctatggttcctcaaagccaagagccctagatggcatttaacacaggcagaggtttactctctcttcagtgctcactaccatggcattgctgacttctgtgttcagaacaaactcccttgatggaaaggagaggagaggaagtagaactttgcaggagcgcattcttttgggtcatcaggtcttcgtgacacctcttgctccaggcatttcaactgacccaaccttgttgtccttgctccaggcaaacagaaccagctgactgttagtgtatgagtctggctaaactgaatattttgagtcatgctactacagctctctaatttgggcctattctatagacttggtttaaaatgctctaaacctttctgaacttatgcttttcaaatactacattggcagtttattaacactcttagcctcatccatcagaaagagcccctcttctgttgaaattctgatgcctggtttctagaatatttgctcattttttttttttgctaaccctaaaatgcttacttatcaagcatgtattgaacaccttcatctacctatctttccaactgtcacaaatgccacttcctgcagctctgagggtaagctgtctctcacaagctatactggatttctcacgctgtcggacaggtccttgacctgagactctggagaaaaccgtgttctaaacataattcccggtcactcccctccttgacctcacatccacactatatcccctgagcttcctgaatcgtatctgcttcaaagtattatgtgcatctgaccttcaggcttcaaagtacaactgatatccacagtattgcaaaagttttcttaactccccaaaggaagctaaggctccacctgtgtcctagatgtcactcatggccacccagacccacagccaaggataaaattggagaaactaaattcaagccttcactgcttcaccagaaaaaaaaaatgccgttgagctctgagggacagctgtgcattttcagggaggtatgcatttcacagcagctctggtacctataaattgacttcccaatctgcagcacacataacttttcttaatgttcactgaaaacaaacaaacaaaaatattccccaaaggtattcatgtgaggaatctgcaactttcttgactccagacctatgatgaagtcacctgagacaacagaaaaaaatgatctggagcctgaagcactgtccctggaacctgccctgcctctggacactacaaagtgacagattgtgtctgctcatccagcttctttctgcaatgactataatggatgctctccagctcctttcagaccctgctatgagcccctccctatgtgttatcccaggctgtgtaaagatgagctcagtttgctgctaggcttaacctgccaaacaacacatatctcctagaatgaacagaattggaacatgaggccaatcaccagatgcccatttaggaactctatgttcaactgctcccatatgtgactagtcatattctttatctatttaattggttgttattgttgttaaagggttgtcccccaccaccattaccaccaccaccaattcgttctctctcagtgtaacaaatacctaagataaatcaacttataaatatataggtttcttttggctagcagtgtaaaggtttccatccatgactggttggcctcattactgtggagttgttgtgaggcagtaagggaagggcagaccaggttttctttctaatcatggatatggcattcataggtgtatattacagcaggagtgcacggcagagcaagacggaaataagagaaggaggaagggatgaaatcttgcctcccctccaaggacaataccctaactttctactactaagctgcatcttaaacattccatcatctcccagtaggaccactagttggggaccaaccccttgctatataaacctttggggcgctttctagatacaaactatagcttacttctcaaagactaacttttaacttcagtagtctcgaagacaccacagagttacctccatttaccacccacaaggggctgaactaagtgttccttacggtcttttctagcagtaaaatttatgatcccatataagaagcagtttcactatctgcctgagattacacataaatgcttttcttttatctgaatttatgtcaggtgggacatccactaaatctaaaagcaaagccattttacttaggatccttttagaacaaacagaatagaacaaaacaaggagcctgcatgtaagttgtcttttgctaaaagaacacatacattttcttgaatatatagtttatactgttgtaaaaaatattagatgataattcttccatgaaaaaaataggacctcataatgattcagagttacacaaaagatgattgacataagtgaaataagggcttggagagatggattaggggttaaaagcacttgctgtataagcatgaggtcctgagttcagatatgaatgcctatatgacaagctggccatagactcacgttcatctgtaatcccagcactgtggtgggtagagacaggatgatcaccaggcttgtgggctccagcctagacaaaaacacatcctccagctccaggagggaccctaccttaaaagagtaaatcaaagagtaatagaggaggatacccaatgctctccaagtgccactggtgtcctacacaaatgtggatgcacatatacacacatatgtaaaggctctctctctctctctctctctctctctctctctctctctctnnnnnnnnnnnnnnnnnnnnnnnnnnnnnnnnnnnnnnnnnnnnnnnnnnnnnnnnnnnnnnnnnnnnnnnnnnnnnnnnnnnnnnnnnnnnnnnnnnnnnnccacacacacacacacacacacacacacacacacacacacacacacacaattagaaaacgggtttccaaaagacagtgaaatagggaaatcttgagtgggtgagaccttgctaaactcatctcattccgaaacctcgaatctctcattgggccaaatcccatgggtaaaatgcatcaataatgcaagacctggccctgaaaggaagggagttggaaatgttccttgttctacattctgaaatatcttgcagctgccgaagacagcagtaagctgtgtgttcttttaagtatatgactatttttttagttaaagaagaagaaaccccacggatcatatgtgtctctctcttgtttctaactgtcacagaggcagaggctgctggaccagtgagactgatgcagcatgacaggggcagcacactgctctcaagatatgatgatacaattccaagagagagagagaacctctgccactctcattatctgctgctgtgctctctggatgccgcctctgctcccttcacaatgaggggggattattaaatataattctgttaattatggcttggtgcaaaagttggatgggtcctgaatcagtgcccccaaggaagaacaacatgaggtaaagattggagggcttttatggtggtgctcaaagataattataggtatggaaaccaatttcagagtgagaaaaaaaaagccaaccaagcccagactgttttcataatgcagcatagctcccttttaatgtgatacattaactgattttccctgagggaggataattcttgccatgtcagtctcctggacagaaagtctctggcttagggcaagcagtcagcaggaacctaggagcttcaagtgaatattgccatttcccagcctctcactgaagcagtcaggaggctgcatagcttatttttccacaggtactccagcaagaacaataaactgaaaaaaaatatatatacatacagatgtacagatagccttcagcacagattatgcaaagatgtaaatgggtccactatatggcacagcatcaaaagtctgtatttgaaataatgataataactcatcttcagttgtgccttctgttaatatccaaaatattagcctttctctttaaaatattatgggccaggataacgatcctaatacacagactgaaggagagtcactttaattccaggctaaggattgcaagcatcttagatgggcttcctaatggagtagaagtgggcaataaaatctctgagaaggcatctactgtcacttgacaatgatggactctcagttttttatactgctagctaagatttctctaatatcttcttggtgctctggtgaaatgtgccttctgataaagttcggaaacatctgttccatctacaacaacgcaatccagtgttctccacattatgggacacaaattcgtgataacctgtcttagtcagggattctattgctgtgatgaaacatcatgacaaaaacatcttggaacagaaagggtttatttgcttaagcttccttccatacatttcctcatcaaaggaagtcaggatgggaacacaaacagggcagcaacctggaagcaagaactgatgcagaggccatggaggagtgttggttgcttcctggcttgctcctcatagcttgctcagcttgctttcttgtagaacccaaggccatcagcccacaatgggttggggcctcccacatcaatcactaattaagaaaatgccctataagtttgcctacagctggatcctttaagagcattttctcaattgaggttccctcaccaatgaccctagcttttgttaagctaatataaaactagccagactgccttccctggggcaagaaatagtattgagtttgaagagaatatgagataggaacttaagtacaaggactcactgcatgctctttcaatctatcaaactataactgaacaactgtctcagttggtatttctcaatctaaaaaattttgtgaaaggcagcagaggagatgtagctataataaaaagaatgatggtggtagaggaatgttggtctagaaatttagactgggttgtgctatgtcagcacctctgacctggagggaacaggtgtttctgtttctggggtgaagctgtcctgtactctgttaacagtcacagtatccttgggacctgcccactggatgcagaaagttacctttccccaagactgtgacaccaaaaggtgtcttcagacatttcccagtgtcccctgtgtaaggaaggagccactctgagttaaagctaacttagggcaaagtgatgtctgcacacttgtttatgggcaaagattgtagagaacagtgttggacttcacagatatgccaatatgaagaatttcagggattatagccatcaaccaaaggaagatgacaaatggagtcaaggaatgctatttggataaatttcaataaatttcctttgagggttttccctgtgcactagttcattcaaatacattaagatcagccatcttctaattacagattccagctgtgaaccctcaaggcaaggtgctgagggtctttgcctttgcagtttgtctgtctgtccaaccagactgtagaatggtctcatgaattttcataaagaaaaacacatgatcaaacctgccgatctggtatgcctcagtgggctaaactggctcggctttttgatgaggtgcttggcagcctgaatatttaattttgttcttttatcttatggttgaggatgcatatgcccagaggcctttggacacttgcctcttttttaataaagctaataaatgcccctaggaaatttacctgtatctaaactgacataaccaagctgatacatcagacgggtcaggcatgagagattccagcaatttatataaacggaggaagctggcatgggcttggactgcctggagttattactcaggccttggcagccttccaggctgctcataattttaaataaattctgatcttggtgatgtatacttattgatcaagttttcagaaagtcatcaccatgtactctttcactacatattgatctgaaatctccacagttcctgagagaagtctggcattacattagctattatctgcaccacaatttatccttctatctgaatcaagcttgcggataagtgagctattctgctccacttactatggaaagagacctggcaagctgtaagaaaatgagagtcttgggtcccgagtgtctcaatctgtcactaattttcattggttattttatttctcaaactctcaattcctcccttgtattacaaaaagtaaacagcgttatcagtaggtaagcaattctagcatcttttctctcccttcaaatggttgttctgaaaatgctctgttgcagacaggtcgcccacattcactaggtggctagtgggtgtcacaagacaatcttgctcaatttcctttgtaaatgatggcctgtgtttctacacagctgacctgagtcataggcgagctgggccaccagagagctttcatgagtacaagtctggctaaaagagaggcatctggacgttagttcctcagaaaattctcgggtatgtgctttctgttggatcttgtactgagatcaaccatagataatgaaatgcctctactccccaatacctcaagtatgaagattctccactagacacatgtgacaaatgattatcatattacacaatttgggagagaccactcccacagctgccttctgatgagctgcaactgagtacaaaccactatagcattatgcttacatgatattatgtcttccctttgtcttccctgcaaggaacaggagtcaccatggcagtttgttgtcacaatttggtaaaggaatatggtcacagagcctcaccaggtgcttctaccctgcaaccaagaaacagtaccccacacctggctagtcagataaaaataacctatgagaacaagtgctttggctttgtgtcttcagggttcatattcttacgtgatccagagacccccaacatgcattgtcaccagaacctcccccaccccctttttaaaacttccctgtttgagacttgtaactgttaagggacagacaataaatgatgctgaatgcccagccataaaaggaattgtgtacatcacccctgaaggaaaatcatggaaaagggggcagggagcaaaagaggactgcaaagatgcatcagggatggctatcaggtgctgctcttacaaaggacctgggttccgttcccagcacccacatgatggctcacaactacccaaaacttgaatttcaaagaacccaatgccctgtggcatccaaagacacctccacacgcatacatacactcaggcacacatgtatacacataaaataaaataaataaacctttgcaaagaaggctgcaatctggactatgaggaggtgtgctgtcaatcactgtcttctggatttggcatggcgcctgcattcatcccctcattacagctgtgataacctgaatcatatcctgtggatgatatcctgatggagtgggtatggactcacaaggacttaaaatttctatgcaactaatggttaggaatgggagtcttcctcagaggtatgccaatggaaatgttctcatgcttttgcaaagaaactcccacctgaactcccataaacaactttaaggaaagtagaaacaaaagaagttaatgtggggaaatgaacacgatcaataaaacgcaatatgtacacctatgaaactatcaaaatgaggcatattattgtgtacagttaatttatactaataaacatttttaaaggggcaaggtcttgtttagagaaataaacatgaatttataagtaaattaaaaatgaagaacttgggttcttaggccacagatctgcttgtgctctcctccaacctgtggagtatattctaggcttttagcaacactctgaaataaacttgtgctttcattacaaaattacaaaccctccctactctacagatgatcacattctctctggattagtgtgtcagtgggctcctaggtgaagccaccagtgtgaaatagtgcctaacacatggagagtgttcaatggctacatattgaattaatgacaggcttctttgctacactaaggaggcaagttggagacagtaccctctgtcactctcaggaatgaatctaatgatatctattgacagatatgtgttggaatacaggagggcagtgaatagaaaatgccctgggaagctccttgcaccaataccttccattctgcttgtttgcaatacccactgtcaactctcaagtgtgctgagggctggaaagatgcacagacttatgagcacttgttgctcctccagacaccctgaattctgccctcagcacccatgttggctgggtactgactggaattccacatccaggaaggagaccaacactctcttctggcctctacaggcaaccagacatacttacacacacacatacacacacacacacacacacacacacacacacctaaaattaattaaatctataaaattcaaagtttctagagtaccactgatcagtctgtgcaaattctactgacaatttcaaaagaaggcagaattgcaattttgacaatacacaaagggggtttctgacctggtgagtggtagctgtaaccctttgttcttccttactatgatcaacgagagagagagagagagagagagagagagagagagagagagagagagagagagagagagagagggctgggagctgagagctgaaagaacagaattgacaaaaataagactgatacataggaaaggtcttatcttgagtaggtaaatatgatgtccaggccagcttcctcccaaatgcctaagaacttcatgagggaccactccaatccccagaaaatgctggcttcccagcacgcattcctacaggatttgagttagttaacaacgtctccactaaggatgcttgcctgcttgttgcattggatggactgagctgtattacctggaaccctgttcaaactgcacacactcacatgccactgctttctaatcttctctgccattaaagatgactataaccaatcctccacagaccacagctcttgatatttagcatagcaattatggtgatagagccattgcttccagaacatgtccacacagtttctcagaacctagctgtcatattataggataacattcaaatgaagtcattgtcagctgaccctaaaaccaaagcttatcctgactgactaggtgaaaccaatgtaaacacaaatcacttaaaaagggatgaaagcagaagtgttcctaacacaatggtgcaatgtgagaaagacccaaatggttatcgccagctatgtacatggaaggtggccagtggccaaaggagcagacaaattctgcacactgtcaatgtgcagaaataaatgcagtcctgacaatacccactgaactcagagacaacgtgggcttatcttcaatggacagaacattataacaatcaatttatgttgtttcaacccacaaagtttgtgataatttgccattggtaattgacggatgcaactacaggaaagtaatacagtaacaagccacgggggcagggcagggggagaattggagctggggagagagctatgtggtaacttaactagatgcctaaggactaacactcaattctcagcactacaaagaaaaagagctaattaatcacaggtatgtgaggagtgatttgggctaactctctgtttctgggtatctacaggttcagaaaggatgggtaataaagtcagccacaactggttctccaggacatgaagtctcctatgccctagaatggttccacccagtaaattaatttcaattcttgctcagtttcttctttaagatattttatttttatttcatgtggatgagtgttttgcatacatacatgtttaggcaccaaatgtagacagtgcacacagaggacagaacagaccatcagatcccctggaactggcgttacagagggttgtaagtcaccacactggtactatactaggtggtgtttccttttactgaaaacagattttttccctcacatagcatatcctgatgtggttttcccctctatctactcttcccagtcccctccatacacctcccttcccatccacagctattccctttctatctctcattaggaaacaaacaagcttctaagggatttttttaaatttatttattagttctagttagggaacaagcttgtttcttcctgtgctgatcctgggcccttcaccatgtgtccagggccagagtgtaacccttcacatgggatgggctctcaaagtcccttcttgcaccagggaaaaatactaatccaccaccagaggctccctggagtgcagaggcctccttattgacatccatgttcaggggtctggatcagtcttgtactggcctccctgacagcatctggggtcgatgtactctcccttgttcaggccaattgttcctgtgggtttctccaacttggtacagaccccttcgctcttaataaaatataataagatgaaactaaaaccaaatatcaggattagaaaaaaaccaagaaacagaaaaaacaagccccaagataaggcacaagaaacactgaagaatcccatgaaagcactaacctggaagtcatgataaatacgcagaggacctggtgcagacccatacaagccctgtgcatggctgcctcggtctctgtgagttcatatgagctttgatcgccttgatttggaggaccttgtttggtgttctccatctcctttggttcttacactctttctgtctcctcttccttggggttccctgagccccaaggggaaggatttgctggagacttcccatttagggctgagtattccaaggtctagctgtgggtctctgtgtttattcccatctactgctgcaggaggaagcttcttgatgatgctgagtatagaagaatattattaggagtcattttattgctaagttagtattttgtttgtttgtttgttgtttgcttgtttttagaccaatattacttgtttttaccctaagtccttggcctatctagtctaaagttcttgatcacccaaatagtgccaggtatagtttccatctcacagagtgggccttaagtcaaatcagatctagcatggtttcttctacaagcttgtcccaccattgcactagcatatgttgcaggcaggacaccattgtagatgaaagggtttgtggctgggttggtgtttacatttctccaagggttgatttccaattctcacagagcagctcacaactttctgtaactccaggggatccaatgccctctctgacctcctgaacaatgtggtgcacatatatacactcagtcacacacactaataataacaataaacaaataaataatttttttaattctgagcattaagactgtgtgtcttgcctgcagcacagtttcatgtgctttcattcaaggcttattttcccattttttaacataacattctaaatggttcatttagctttcaaactgaatgacagataattagaaaatagcacattataagacagaaagactgctaaggatacacagcctgttagcaaaagtatatggtgtgattgtggcagcaaaaaaaaaaaaaaaaatcaaagacaaggtggaaccaattgttctacaggcaagtagccagagactgttacattcgcctgtactcacaatgatcctgagtctccttctaaaacctgttcaaattatgtcctgcatactctattgtgtcagcaaggaagtatatactactttggcagagatttcattagaaactgttgacataatttaaatgttgatgttccccggaggaccatattcactcttcagtttgctgagtgctgtgtaccgcaagacagctgaagagcatgcgcagtgggtcccagcaaatgggaaaagaagactcgtgcttctgctcaaacctactaaatatgtagagagccacagaggcacagtgacatggctatcccaaatatcagtccctgctattagtaaaatcacagttcagagggagagattgaagcaatcattccaggcgggacacacatttgcaaatgtcacatcggaagtataactttattatgggaaagcaatttaagttcatcactaatgcctgacatttcaggatggtttttgccccgtttttactaatcacactcagggtagctctgtctttcacagctccatttatgattagactgctgaactttacagaaagagttgctgggtgaagctccagaatttgattttccagctgatctttaccaactcaagtagcttcagtctgtctccagctttttttcctttatataaacgtatgtcataattccaagataccttttatgagaaataaatgacgtcatcaacaacatcaacaaattctggaaaggtaggttgccaaggaaacctatggtaggaaatccacccctctgtggttcattgaattgtttgggggttgcctcatagttaactcctttacaaaatggttcaggatcccttgattgattttatggttatctgttggtaagacattcttcttttttttttattttgaggttttttagtcattgtaggaagccggttcctgcattatccattacaataataggtgcctcatagggtaacacgtcccaggcggctggccagcctttataagggatggttttcttggttcaatgtctccgctctggaaagcttatgctctcccctcacaagatgcattaaagcttgtctgcagaaggatccgagtgtcctgcgtatgatttcttgccggcgagaaatacagagcgcgcgggacaagtcatgaaatctggggctaaggttttacagtagcttgccaggctatgcagacagagacctcagtctgcctcagctccaacactcatgtctatattgtacccaacatctccctctaaaaatatgtataaagcaaagatggtatcaacatataacaaagagagtcataaatagttataatgggacttgtctggaagatatacattgtataacatctatattattgtataacctaccacttgtcaaaacccagctacttggtaaaataatacattaacaatttattatagcttataatacaaaaataaccgtaagctactattctggagttatatatatttctccacttttgatgtggaagcctttcactaatttagaaaggatcttcatggtctccttagtcttgtctcactctctaagttccaggtagaccccattattccttataggatacaaggcgtttataattcttgtctctcagtacccctcctaaagaaacactgtgttgcagatatggtcagactagcaaaaatatcactgtcaactttaatctagatggctcacttctgagcaaagaaactttcttagggtgatgccagtgtcccaggtgtttacatcctaaaaagactctcaaaggtttgctttgctaatccaaattgttatttttgtcctcctgaaatattaagctgttgagctccacctgaattttcaatctgatgaaatcagtttggatgatgattcgcatccatcatattatacttgtttctaggttctgtcatccacaaattagataagcaaacctatgtgtctttatgtaactcaaaattttaagaacatgtatgagacaaattttaaacagagtcttgttagaaaatttctaaataatgatttctaagtgaatgaatgagtcactcagacaaaattctttgagaatgaatatgagctagctatctatttccctgctgtatccataaccatccacatacttgacacacaatcctgtatagttaatcaagacatcgttttcatctatctggtctcttgggatgttttcatttctccatgattttaaaataattgtccaaaacattcactagcacgcaactcagcctaagacaacacagtaaaaaacacagaatggtcttatgtgttcctcagttctcaacagcctgctaaatttttccagattaataactgctctccttgcaagagaaagtcgaatcaaaacagtgtgagcagcctcagttactccctctctgtgtttgtagtgcaccatctgaagcaagcagtgctgcaggaaaattgttctcactgctatctgctgtaccaatcaagttaaaccttggatcaaagagcagagtcagtgattggctgactggaattagccatagatttgttggaggactgaggaaatcagatagagaaggacaggaagagataagaagggcttggagagatttcgtggggtttttgtttgtttgtttgatctaagaactgtggagagtagggtcaggtgattgttcctctgttgttttttggatttatcaggtttttatctcaatttctgactcctgagtttttattaacattagaacaattaaggtaaattctttaaagcaggagatttttcacttactcatttgattatggtaacactgactgaatgaatatctgagcttcatgtttctcacagccgtcaggggttctgtgatttgtgttcaccctttcttttctcttccctccatcctgggaggcctgttaggagaccccttaagacacagaaagtacacaactcagaagtctcagtaagtccctgaaacttaggaagatagcattcacaaagctccctcctcagtaatagctgctatggacaggagagtctctgacccatccaactgcttacaagtcatgtagagttccaggtttcatgactcatgacccatgctggaatgggctttcagtgatggagcagcgtttgagtcatccatgctcctgaaagtaaccatactcctttaagtattctccctaaactcactgattgaccatactggacttcagtggtactgtccatctattataagcttcctatctgcagtgagtagacgtttgttcacatctccccaggaatagtgtcgcccaacacctatttgtaattgttctttaacatctatgctcacagaactgccattataccatcatcatttctatcactaagcataccaattccattccccaatccctcttgagttctttattgttgaaattcacctttcttttgtcacagaattgcctggttggtaacatacttgagttatttgccttggtaagtgatatcactggaaggttcagacgttttttaaataggaacggcataaaagtaatctctaatattatttcaggttattatttactacaatctacatgcatgtaaatcgatacaattaagaagcaaagtaaaagaagcatgtatctgaacacagtaatgtacaaatcagaactcactcaagaaaattgtggtatccaaataaacagtccagaattcatggagaagccataaaaataaatcacattcaagatgaaatgtaactatatgtcttttagtatagtgtaccttggtaggcaatggcaaatgagacaagaaatgcctcttgcctctaggagcttccattatggcaggaaagactgtataataataaggaaattaataaaagaattaaaatgctagatgggaagatgtggggaagagtgttcttttaggtaagttggtcagagaaaactctctgagaaagtggaatgagttcaaaactgatggataacaagtacccagctatgcaaacattgaaaagagaaatccaggaagagggcaatatcccaaagatcaaaatgagagaaacctatcaatcacaggaaacctgcatagagaaaaaagtaacagcacagggatcctaagtatcatgaatatctatactaagcctaaggaagcaccaaagaactttctagaagacaaaaacataattttacaaaggtcagagaataatgccatatcaaagaagtacacagacaatttttctactttaaattcatctcaaagtggctggagagatgccacagcagttaagaacaccaactgctcttccaaaggaccagggttcaattcccaccgtacacatgacagcttgcagtcatctgtaactccagtcctgggtgatatgaacccctcttctggcctccaagggcactacatgcacatggtgcacaggcaaacagataggcaaaatacacataacaataaaagtgaccatccctgacctacttaaatattccatctacaaataagctcatgcatgattccgtatgctctaacatgtctctaacaactgtatgtttagttttaagatgccacttttcacttttcacttttcacagctactgagaattgccatagttcaaaaatgttaaaccccaagtgacagcagcctcttttggggccttcccttctcagaaccctcccttctccatggaaataacctttcccttgtccaatctggtgctcagaacctcagtgtttcttggggttctcgaggcaatgctcagagaagtgaactggaaaacatgcacaaagacaaaatgacataaaataggccacagaattatcattttaaggtaaaaactcaggtcacatcactggagagatgactgaacagttaggaatgcttgctgttcttgcacaggaccagaacttgggttccagcacccaggtggctcacaagtgcctgtaacttcaggtccaggtgatccaacaccctcttctgttctctgtgggtacctgcatgaatgtatatacccacagaaacacagatatacacatatataaaaataaagcctttttaaaaagaactcaaggtgggcatggaggctctcaactgtaattctagcaattgagaaaatgaggtaggaagattgatacaagtttgaggccatcttgggctacatagtgaaaccctgcataagaaaaaaagaaacaatgataaaagtaagtcctcctcttagtggttcaaggaggcagagggaaagatgacagaaccagggcagagcaaggtgaggcagagttctattgaacaggaagtggtgatgcaggcagcggcaaccacagtactgtcatcaaaggggaagagcagaattcattttaaggaaatttgtaaattataggaaaggtaattttttgttctgtggcatatgctataattccttcctctcacttccttaaggcctcttcaacataaacctgaattactttccaaggtctcgtgggatggagttgagaataatggcttgcttttgttaggattttataggcgaatggacagtctgtaaatccttactttataggctcagttgaacccttaccatctgttgcttgaaaacacatcactgattctcctttctatccaaaagaatggattattccagattttccttatcacatcccttgccctcctggttcctagccaggtccttgctcactaactcactaaaataataacccaagtcactcgtattcctacctcttctcttccacttgctcccatttcatcatctgcttgcttccttctgttagactgggggaaaacatgctcctgctcctttgccagctaagcctattgccctccctggcttactaaggtgaatgtatcatcagtcatcattaatacctcaggtggaatgtctttctgtatgctgtgaatatgttttattaccattggttaataaagaagctaatttggccaatagccaggcagaatagagtcaggcaggaaatccaagcacagtttcggggaaaagaaggcagaatctgggaaatgccagcagccactggagaagcaagatgtgaggtaacaaccacaagccacatggtaaaatatagaataacactcctccactgctcgtgggagtgccaacttgtacagccactgtgaaaatcagtgtgttgactcctcaagaaaatgggaatgagtctaccacaagatccagcaattccactcctaggcatatacccaaaagaagcacattcatataacaaggacatatgttcaaccatgttcatagcagcattatttgtaatagccagaaactggaagcagcctagatgcccctcaaccaaagaatggatagagaaattgtggtacatttacacaatggagtactactcagcagaaaaaaannnnnnnnnnnnnnnnnnnnnnnnnnnnnnnnnnnnnnnnnnnnnnnnnnnnnnnnnnnnnnnnnnnnnnnnnnnnnnnnnnnnnnnnnnnnnnnnnnnnnnnnnnnnnnnnnnnnnnnnnnnnnnnnnnnnnnnnnnnnnnnnnnnnnnnnnnnnnnnnnnnnnnnnnnnnnnnnnnnnnnnnnnnnnnnnnnnnnnnnnnnnnnnnnnnnnnnnnnnnnnnnnnnnnnnnnnnnnnnnnnnnnnnnnnnnnnnnnnnnnnnnnnngggattttgttttttacttttttgttgttgttgtttgtttttttgtttttgtttttttttgtcttggtttttgtttcttttaaatggagtgtgatggatgtctctacaattttgttcaaatgactgcagaacctggaaaagctgttgctgctattgatgcataacatattgccattattggtctttaaatataaatataaatataaatatatgctaattgaaactcaaatatgtgatgaatcttaggtgtttcagttagtgctcacctgtgcatgcaaatttgatttcatctttagtaagtagtaaagttatatgcttgccaaaaacaaaagtgacacactggaagacaaatgtcacacaatttcaattttatgtgtaacctagaaatgatgaacttatgggaacagagagcagaattgtggctattaggcttcaatgtgggccttttaacaatggggaaatgattggtttaaggatataaaactgcagttggacaagaggtatggactctgtgatgtcttgaggtctactgagagcatgataaatatggttgataacaatatgctatattttaaaggttgtgagatcgtatactttaagtgttctcaaaacaaaaatgatgaatatgtgtgatataacatgttaattggtttaatttagccatgccattgtgaatatactgtattatgtaccataattgtgcatgactttatttatgagctaaataaatgaatggaaaaaatacaaaactaaaaaaaaaaaacaaaaatatgaaacaaaataaaaataggttaatttaagttgtaggagctagttaataataagcctgagctaatagaccaaacagtttgtaattaatattaagcctctgagtagttattttataagcagctgtggtacctggtgggaggcataaaagtctccagctacaaatatccttaatattattttctgtattctcaatagtttgtgtggtaaaggtcccctaaagactcatgtgttcaagtcttggacccagtgtgatcctatgtgatgataatgaaactttaaagggtagagtctcatgggaggaagttgggctattgaagcatgacctcagagagcgttctagaattcagcctctcttctacctctttgcctttggcgtccatgcgacaagcagcttctcttaacctattggtcctgtactacctcatcacaggtccaagtagcaggatgaactagccatgcattaacacaatgagccaaaaaagcagtctcctccttgtaagttacctcaggtgtttcctcacagtggtggaaaattaaccacacacccttctacttctgctatagcctcttccttctcttgctctcatgtctcaacctctcagttctactcttggaaacaccataaacaaagattcacattcctattacagtatctcatagcagacctccaacaatatataagttcacaatccaaacactgtttcctcagtttctagtctcaaagacataggagatgtccccaaaaatactatgatacattatatttgatagtgtctcattcttatgtaaggtttttttgaatgctaacaatttttcacccttttccaattactcaccaagtgctttggatcctacttctgaaatgatcttcaaaccttacctttccctaaggtgatccacactccaatccatcttcagtgcatctctggatagtaacagattcatagcaggatccttattgaacttcttgactctatttcagcacttttaccattctattttctcagagctattgcttctaaaactctaattggatcatgtcattgtcaagctcaaacacctccagtgactttttagcacctaaaaactaaagtacaaatctcctacccagcatgtaaaaacctcaaggatgtgacaccaatgtccttttcccatattttcatctccacccatcacacacacacacacacacacacacacacacacacacacacctctatacacaaacaagaaatgctacacatcagcatatattaattatacaacataatacatggttttcaattgttatgtgttcatacatgtataaaatgaacatataaataatcatattcccctacacatgcatttttccttaacaccttttttctccttctattggtctcctttctcctctgaaatgctcctgcttctactttaatgtcttttttccagtctagagtctttaagttcaaggaaaggggtgccattggtttttttaagtctggactatttgtttaacataatgacttctgtctacatgcatgttcatgcaaattacataattgcattttctttatgactgaatgatacccattgtgtttctgcaccacagtttctttgcccattgataattgatgggctcctaagttgttttccatacctttgtcattgtgaataagataacgataaacatagatatgaaagtatctgtgtgttgtgctaacttagatctcatgggtatatatggaagagtggcttaattggattatatagtaattctatttgtaaattctattcgttttcttttgaaaactcaacatcaattgttagagtaacaaggctaatttgcattgccactaacaagtgtctctgttcctacacacttgacagttttcacttgttttcctagtgacagccattgtgactactgtgggatggactcttgttataatttttatttgcattttctggatggctaaggctgtgaacactttcacgtttttactgaccacttgcacctgaccttcctttgagcaggagtttagtccctccagcctttgtttgttcttcatagacaaagaaatggaattacctctcatctatgactcaaccagatcctactcacatgaaccacaccaactgccttgtgaagcttgactcaggacactcatggaattgggtattgcttttcactccagtactgccatctgtccccagcactgaagaccatcctgtgtgacacaggtactcttatagttctaccttcctccagattgtgaatatttggaaaatagggactttttctactcacaattgatttctttctaaatgtataatatgtagtacataccttttattgaataagtatttgttctctggagtaaatataatagatttgtccatgagatggttaatattgccaacttgacaagacctagcattcgtcatgggctccaactctgattttcatatgtcacagtgtttttcagttctatgcatagcagtaaaactgatagactaagtataactcatagtgtattgcaatgcccatttgggattgcagtcttctttgagatgcagtctggcagtcaaatctctgggcatgtctgctaaggggtttctagattagatcgattgaggtgaggagacgcattctaagtaggagatgcattccacaggcaatgatactggactgaattaaaaggagaaagtgggctgagaagcagcattcatttctctctctgcatcctgactgtggaagataatgcgaccagctccctcaagctcctaccactatggctgtcccaccatgctggacagtacctttgaactatgagccaaaactaaatccttcctgccctaagttgcttgtgtcaagcaatgaaatgtcaagtttgacacagcaatgaaaaagtaatagtatttgtatccacatagcagttaccagtatcacactctgttgattgctttcactgcatatgggagaattacaattacaatgcttaagtatatttttgagttttgttttaaatgtaagaacaaatggaatgaagatggattttattcataaacacctctttggaaccacctgtttaatactaatcatagcaacagccattgattggatgtcttctatattcagacacttaattacagttttgtattcattgtatcacttactcttctaagaaaatctgtgcagcaaataccagcttaagcctatttcacattaagtgaaactgagtctcagagaaatggtcagtcctgagccacacagaaaagtagaactgccaggcatcaaaaggaaatttgtgtggtgttggagacactgtattctgccaagtctgtttcaccggctttccttgctgcctgctgtggagaactacaaaaaccaagcaactgcctcacaagaccgaatcaggaagagactacaggctgtgtcagaatgcaccgagagaatgccgcatgttaactggaaattgcgagaaaagcacagaaggaattacagaactggggttatagagccaggagtgcagcagtacagaagagtctttgtaaatgacaagtccatggtttgaaatactcagcatgccaaaacctagtccaacttatgaggtatcattcgcctgtgcccaacccccccatcccttattaagatatatctaaaaggttgcccttaaaatgacactagaacttatgttcattttagtttcatcttcatataaaaataattctttaagttagggacagatgaatctcttgaagtaatgaccacatttctaattttgttttcacctttgtttgaaagtgtttctgttctccacagaagatatttccccagaataactcttgagatcacaaacagagaaagaaaaaatgtctagggacgagtgtttatacacagacacagtggccttacgttaaccaagcatgaattcccacttctagctggaccggttcatggtgtgaaaactgaaaagagttcattttgtttctcgtagcctaggagccctttctccaagctgatggcaattaatttctccctttcctttaagttttctcttcaaacctttacctccttcctctaaaatgtcttcaccataactcagtgtgagtgtgtggggaggggtggtcaagaaaaaaatagatctctgaacatttagctagatgtcaaatatgtctaccccaagggaacaaccaagtttctccatcttcattttctcctttatggtcttatgtgtctcgttagatcgtaagtcctcagggagaattcatgcttttagtatctattcagcaagcagcatattgcaacgaccgaaaagatgcttatctttagaaaaatgcaatgacgtaaagctatagtcatcactgaggagaactgacctatttctttgttaaattatctgcagttttcatgtcagagataaaagtgttttattcaaaatattaacctctagaaaatctcctaggaatgagccttggctgagaattggaaatggaattcgacctaattcttttccctcacagagtctatgcaactgatccagcttcttcacctctttgtatctgttttcttgttcatgaaacacatattctagccccgttcagtctccctcataagaatctctggggctggagagatgactccttcattaaaatcatcttctactcttgcaattaggttcccagcacccaggttaggcaactcccaagaagacacctaagagacaagacccacccgtgaactcaaggctgtagaaatattcagggaatggcagaggaacagctaagaactgtgtaagtaaaaactcagcaggcaaagaaaatcatagaatactaacaaagtactaaagtatattattttgaatgttttaaatttacttttcaaagaaatcattatatactaatggaagttgatctggtctccacttttgatttttctctactagatcatagtaaattcaataaagggtgaaaaatacagtgaaaaatcatcctaaaatggcccatgcaacttagaattgtctcaggcaaagtcagcccagtcagggcagaaacacatgtccacaacagtgtttgcctgatgggtcattactcacgagaagtggaaaggatgggccatgggggtccttgatatatctgagggcacaaagctacctcaggtggggttgggatcagccacctgaactgccttttgtgaacaggatcaacaataaaatcacctactggcatttctcccttattataccccaattctgtttccaaatgtcagtctgatggtcatctatcttccataaacctctcattgtctcacactcacaaatcagaataaggcttggtcactgccatccacccagcatggttcctgaatgtccatgtccctgtgcccacccaacagagaactcttcacctttcccccaatactcagatactttcatctctggaatgctgtccaactttccctggccccatccttctccaagggcttatggacagttcattgttgacaagacagtgaaagacatttttttcaatggttcagtctggcatcctcaaatagatcctcacccatcttaccctaagtaaccgtaattaagccattggttcacaaagctggagaccagtggagtcatttctttgtcctgtctttggtgccctgtctggatgaacgtttgttcatcttcctagaaacaattcacacaataggactataaaagtcacacaaccaaacacaggcctccatgcttacaagtcctctcagacagcaagctttagtagctagagtgtgagcctatacacacgagcaactgtgtggtaacatccttgcacagcctgacctggagacagcagtggatgcctggagaatccacaccttatgaaattagctgatcacagggtgcagaccattcagactgcatctcaaagcagaccatactcccaaatgggcattgtcatatgccgtgagctacaatttgcctatcagttttattgctatctagagaactgaaaaacactgtgacagaatgaaaaacagagggagagaccatgtcaaatgctattggtcctgctactgcaactttctggggtaagctaccactgtttcttctaattctttggttttgtcttttgagatagactctcagtgtacacccagatctgcaaactttctgtgcagcttccaagggctggcatgacaagtacaacaccactcctggcttttcaagcttcctgaggacaggaactcagatatctgtgtcatcactaacctgaaatattccatacccgcgttgaactaaactcaattgaacagatttggggttttttgctttgttttgttttgttgttgctgttgctttgtgaggttattgtttgtttatttgtttgttacttatttttgtttgtttctgaaaagtaagaatctattttggctcacagttcaaggacacagcccatcaaggcagggaagtcatagtgagcttcatttggctgatcacatattatagcatcagtcaggaagcagagagcaatgagcagtctgcttcctttctactttttatggagtctgggaccccagttcaagggatgctgccacatccatttacacagcatctcaattaaacttacctagaaaatccattaaagacacaccagaagcttgttacctgggagtcgctagatcctgccaagatggtaatatgagcaatcatatctagcaatgctatccccaccctgctgattgccattccattggcttcacagtgagacagacaggtggcagtgcagttacttttgacactggatacgaactcttttattaattaattaattaattaattttccagcccaatcacagttttctctctctccctcctctcctcctagttcctccccacaacctcccctctctcctaaccccatccacttctcctccattctcttcagaaaaggacaggcctctcacgtatatcagtcagcctggcatataaagttgcagtaagactagatacctcctctcctattaaggctggacaaggcaacccaataggagggaagggtaccaagataaggtaataaatagtcagacacagcactgcttcctcggttaggaatcccacaaaaagaccaagccacacaactttgctgctttacaaacataaacagcctgtttaaatacatgaaatattttatacttaacatatttaatatgttaaacatgtttcaaaatgttaaataactcattttcatcagtgaagtctgtggtagagagtggatcagaacacagacttccaggtgaatatttctaccactatactgtactaactcctatccatttcagaaaaagaaaatttaaattgagtactttttttctctacccattattacatctctactattacgcctaaattcctctctgctccagcttgttcgggcagcatttaatgatgtttattgaagcccacttagcccatgttcaacaaaaacattaaatgcacagtttttaaaaggagaaaaacatagcattgagtattgccttactttcagaagataattttgtatgcatgtagaacttactatggacttgggaataattccactttatgaccctcatattcagttgctaattactttttcgttgtcttcaatatatttctattgcatcaatgggaaactatagcagtcctctagtgacaaaaattatccatatcaattgttgtgaatattaattaaaagctttgtgtcttcatggaaaaccatctacatcctacttcaaagacatttcattgcagcactataaaaaatattacatcagttaaaattttcagtacattccgatcaataagattataggttcctttgttgttcttcaatttctgaaaagacaaacattttttaaatgaagtcattgatctaccacactttgcctgtaaaagaacctatttcaaaagaaaataaatgtgtcatatctgactgagggaaaacaatatcagagaaagaaagccagttagttgttgaggcttcttaacgagagtgcagttgagagaatcaatcagccatgtttgctgtgtgccaagcctcacagaagtggaacacagagggaagagtaatgggactgggttctcaaggtagagagactggtgtcttcacatgtgttcaggcatgtcacgtgtacacttaggtacgactatgttcaggaaagcactaagatatgtgatgagataaactcctgcctgtactgatattgttctctctcatctccttgttttttgagagagcacttcaagaatacgaagtgagctgtaccgaaggcaacttgtaccaagatattgtgtagaacactctgtcttaattaatcttggttatgctacctccaaggatcaatgcagttctctaaaatattatatctaaaacatcaaaatgtggccaagatttactagagcaaaaattaagtcattttatgttgctttttaagatttgttttctttttgatcctatgtatgtagagttagattttgtactcatgagtataggtgcctaccgaggcaaaaagaaaaaagaaaaagcatcagttccccaggaggtggagttacaggaggttgtgagctacccactctacaccgatgctaggaacttaactcccatcctctgcaagagctgcaggtactcctagccactgaaccatctctctagccacaaagaatcttattttataagcgtgataccatttatctttacctgaaagaaggtccttgcttcaaacacaattaacagtgcggttaatttttacaaacaaatgtgttctgggcctaggccctatcccaaaggatacaatagactctgatgacacccaatgcatggcctcaccatccaggggaagcagaaaagatatgtgatagatagggttttagttgggagggtaggagaggatgggagggagaggggactgggattgtcaagtaaaacaatcctgtttctaattcaaataaaaaaagttggaaaaaattttacaaatagataatgaggtcttgagtttcaaaaagtcaagaggaataagtcgacaatgactggtgcacagcaatgtttcttctgcataaattgcacactcattgactatcacagagcccatgccagtatcttccctagtgccatcattcacctgcaattctaatctcaaagtgactgatgctaatttgagcattgtccaagtctcatttgtaaaccctgctctcttcagcacaggatcaggccactatagagatgagatctgccttttcctgagctgattgcatcccatcttggggcttgaggatgaatgcttcccaaaggctcttgtttccagtgcctggtgcccagacagggctatctgggaagcttgggagatgctaccagttggagtaagtgggttgctggtggtggatcattgattggggacatcttgtccctgcttccatcatctcattctctctctctctctctctctctctctctctctctctctctatctcccccttcctctctcttcctctccttttttcctctccctctccaaaaaagtgaaaaacagcctctcagcctctctaccactcccatatctccatgactcaagtatgtgagacagagcaactgtgggatggtcctctgaacctgtgcaagccaaatagtgttttctcctccctctaacttatcctttcaggtattttcatcatagatataagaaaagtaacaaacggattccatttatcagatagaagactctactgaaaattagagcagtcaaaagaaataatgtcacaagcaggaaaaaaattcaaaaattattattttgccttttgattgttaacacacttcttacccaaaaatagaaatgttgcctagattgtggagaagttaggacatttatcagtcaaggttagattataaaattcacagtaaaaccagtatgaaaaacagctttgtagctcaagatgtgaaatacagagttacatataacctggcaattccattcctaggaaaatacccaagggaaataaaagcatatgtcctgctatggaaaaaaaaatattttgacagttgttaaaatagcaaggcagactttattcaggaccattgtgaaaggtgtcaagattgcaataggcaagagaggagtgtctcagctcaaagcaaggatgctggagtatggacaacaagcaaagtggggagcagacaaggactcaaacacatcaaaagaggattctccctacaaaacttaacagggtccttattagaggtacattcgaggtctcacatatcaaaattcaataatgagggacacaatgagcattcagagtagaaacatgctttctaagccaatttgacagggatttttctcacactcacgtctccagtcctggtgagaatgctgctatggtaaaggcttcactgagaggacttggaagaattttactaaatttggtcaatgaaagaattagtcagtcctcacaaaatcctgtacatgtaggtgtctagcaaaattccccataaccaccaaaagagagaagaagtaagtaaatgcctatccacgggagaataagcagaatatatatatatataggaatattcttcaaccctacaaaggatgaagaactgatgcatgctgagaaggcaaacctttaaaacatgatgctaagtgaaagaagcctgtcatgaatgatcacaggatgtgtatgctcggcttctttgagatgtgaagatgaggcaagtccttggagacagaaactaaattggtggttgccagaggacagggaagaaagtagggactgggcggttatggtatacagtttcttttgagactagtgaaaatgcagtagaattggatagtgataatgattgcccaacaatataaatactacaaacactggatagagtgttttaaagggccagttttcacagttttcaaaatccccagatatttttacaggtgaggttctaggcacacactacttttctcaatcctttttaaattcttccttagtggtggggtgtgtgggggagggtgattgctctcatctagttatgcagagaaaatgcactttacctgcttcctgctcaagctcactcccaggcaggcctctccctcccttatacaccaacacacacacacacacacacacacacacacacacacacaaataaataaattaattaattaaattttatattaaaaaatagctgggattgggatgtagctcagaatttagggtgtttgcctagcttgcacaaccctctgggtttaaacctctgggtttgccacacaaactgaacgtagtggtcacgcccaccattatcccagccctgagaagatggaggcaggagaatcagaagttcaagcccatcctctgctacttagtgagtttaattccaacctgtgtatgttacatgagactctgtttaaaacaaaataatcttagctagctgtatgtagtcacaatgtgatttccatgaagtcacaatgattccatgaatcgcattgaatgatcctcatgccatccattgtgctcatctactcacagcccacccctggagccctcaaactctctctggtatcatgaagatttcagatagggcatgactatacagcaaaagtcacaaagacactagcatgaaaagacatggcactgaggatgctgcagatataacagtagggaaaagtcacatggagaagctgccagtcaatcctttcctggctttactgaacaaagaacaatgacacaataagtcaaacgacctgggaacatagctaattcaaggctcaggattacagtcttccacagtttaacacaaaaccatatcatgatgacttagactagagtccaggagtgcccagaccaaaggcaaatatgaaacctcaatgacttcactgggggagaagctctcctgtgttcccactccactgtcctagaatgtagatttttgttctcctgttcgttgcctcatgtctgcaagataactacaaacccttgccaccccccccccccacatacatctaagttccctaaggaccagaccagaaaatataaaggattggatgaagaaaaaattatgaacatttccttaaagtctccttgatcaaaaccctaccccttgatgtaaactaatatagaatgtaaaatttgaaaacaacaacaagataataataataataaggtcttcaaggtaataagattagaatgcataggggtaggcaattagagttagggttcatgaatacttcctcaatggcttacagattttctctacagtctgtatgtgcacacgtaggtgggaaacagatacatgtatgcacatgatatggaagccaaaggaaaatgtctagtgtcattcctcaggcactgcacacctgttgtttttgttttcttttctttttttgacaagatctgtcactaacttggaggagtccaagaagggcagacaggctagccttgaaccccctgtgttcctcctctgtctgcctcctcaagactgggattacaaatgtgaaccatcttacttggccttttccatgagttctcagcattaaactggagccctttactgactcaactatttcctaagcctttaaaaaaaaaaacctttaatttttaattttcacacagagtatagcttacagataaaattcaaatatagagctagatgcccatctcctcatcaggtgagtcagaatcaatttgccattttcattgccgctaactaaatctctatttgtgacaaactgatgccaaagaccattattttaattgtcacagactaatgagaaaaggagataaaagctagaaaggggtgacagtgcataaaggatgggctgggacaaagtgaaaaccaaactacactgcacactattgggaaaagcagatatacttactaatctgtgaattcatcagacaaggctatgcctctggctgtctcccggagcacttgcttccagacagggagcgagaagcccttctgatagttttcttcttttcctagtgtacagggtcaaagtagttcatagagccctgtgttcagagaagtgttagccctctgatttaaattcaattgtttttctttgttgacaacaagatccaagtcttggatttgacttcaatttctgatcctcctgcctccacttcccctgcaccgccatgcccagtttatgtggtgccggggatggagccaagggctccacgcatgtaaggcaatcattctaccgacttatcaacttagctacagtccaagcccttaaggcagataatttaggtattttgttaaccaaattgcatgtagctacttgcgacacaatgaaaaaccacagcagctgtaaaataagaagaaaacctgaagaatgtgcattattatgactaggtagcttctgcagattcctgctatagtctagtggttgttgaaaaacaaccctccctgaaactatcaaccagagtaattaaaaaaaaaatcaccaatgttaaagtcactgtggaaccagctgagaaatttgatgagcttccatctcccagtccaagaagagtggcattgtgtagcctgctgagctcttgcccagtttcaaagcatctttccactcgatgataaacagactggcacaaggggctgtgccaagtgttcatcgttgtgaccaagatacccatggaatcgagctcaccctattatcctgcctggactactaaacaatcatgcaacaatggatggttatagggtctccaaaagaataatgtgtctaacttaaaacctccagaacagcttcctttattctcttactctgaagaaagcaatcctttgaatgctctgtggcttcctggagcagcctcagtggatttgagcactctgcttttctatttaaagctcctaagaatgaaagatgccattatagagagaactagccaccagcagtgggagcatgacgagtcctgggcttcaaaatgaacttgtaatggcagagttttccaaccaaggaccatctacttaatgatcctcaacccgtgttcaaaatctccccaagccagcaagactcttctttctattcgaatcatttcttattctttccttggacaaatattctggagttgtggctcacaagtccttcacgctgtacagtgctatctcacccttccttacccacttcccagtcttctgccgggtaagataagcaatgccccttaagctctcctctttcaacaaagtcttccactaacagtgtggatgaaagatttcagccatcacacagcttcttctatcattcctgaattctgggcctctagtattcagatgagagtttgatttcattttcttaagattgtgtgtgtgtgtgtgtgtgtgtgtgtgtgtgtgtgtgtgtagacagggaaggttcttcatcaaggtattatcctgggctgggaactgagaagctggctcagaactccaatgttccacaagagcaagcagcactaagggtgcaaccacggtgccatctccccagccagagagtctgctttctaacagctcagaaaacacagggatgcagcttagaactgggagcaagtgctctctttaatctcattttctttatcctctcattccccaggttttccatatgaaaagttgccaaattcttcttcttaatcttccccaccatcaatttcttaccccaattctcccagaggccccctctttctcacatgttccttctgcactctctcttttctgattgaccaatcttggaaaatgcaaacactatcacctacctatctatcatctattaatctatcatctatcaatcatctatccatgtgtcatttatctctatcatctgtctatctagctatcatttattgacctctgtctatctttatgtctatatctatctctatacctaacatctacctatctacctgcctatcatctatctgtgatgttagttttaactgtcaacagagcctggaatcacctgggaagagtctggatgaggaaatgtccagatggggtttgcctatggacctgtctatgagggattgtcttgaatgctggtgtaggaagatccagctcactgtgtgcagcacaattccctaggctacaccctgaactgtttaagagtgaaacaagtaagcaaagatccctctgtttattaagttcctgcattaacttcaccacaagaagagactgtaatctgaaattgtaagccaaataaactctctcttcccaagttgtttattgttgggttattttatcacagcaacagaaatgacactagaacactatctcctctctctctctctctctctctctctctctctctctctctctctctctctctttctctctctctctgtgcgtgcgtgtatgtgtgtgtatagctatttatatacatatacttgtaacaagaggcaaggtataatacaagacagctatctccaagctttacctcatgatattggggagcaaaacatttgtatacaaacttctttaagtctttgttcacataaggcttgataggaccatctggcattcaagtgatccaaatacatcttttacatatggagactgcttccctttcctccccagccagagtggggggggaaaggagcataatgcttgcttctaatttagtgcttggtgtcttcagacaccaaaagcaccaattgaacagtgagttagccattgagaagacaactcaggtattgttaggttgtgtagatatcaagcttggaaattctttcaggtaactcacaaagctccaagaacaagtgacaaaccctgctttagcccaaacatgtaagtgtctgggtgaactggagtgagtcaacctagaagggtgattcatcactgctgacataccacctctaacacactcaaatctgaagtcacttctttcttcattgactctggggacaaatcttgagaatgaatgaccttcttagctggaacagctagagtgagatttgaaaaataagccctccctgagccagaggagtttgatggtggatttctccaaggcaacgagcaaggagaagctgacttcactctaagctgctaccataaatggttgaccagttggcatctctgcagaactcactatggccactggtagagacccacccagggccatgggggcagcctgccattctgtaactgctctccccacctgtcctagagcaggggttcacagactgaagatgtggttgttcagctactcttttatgatctgaagagggggtagttctgggcttgcctagttacgaatgccttgctcatgctcactgtctcttcacatatctaccagtatcctacctgagcctttccacttgtggtctagaaggccctcacacacacaccccacagaaacctactccagctgaagcatgtctttctgcttcccatgacatgtttgtggttaacactgggccttctccacagctaaattccaaacctcatgtaatatccttgaagtcagagacattattctctctctccctcccttcctccctccctctcataatgactgagagctgtttagaattgtttgacactatgtcagaagacagaacaaaggaatgggacaaggggtggctgttcagagtgatggaacaaaaaggagaaaacagggcctgggtcctagcacttatgtcgggacagacagatgcacagtacttctgggggcaatgtggaaccttccacattatcctgcattatcatctccacatcaaccacaaatttcataagaggaaatagccaagattctaaaatgcagcccaaaatgactttgttttttttttgttgttgttgttttattggtaggttggttggttggttggttggttggttggttgttgttatgtttttttgttctgtttttgttgtggcacaaccaagctctgtcattcataatatgcaaggaaatgtatctcttttctgctcattatcagagccagcgtcccatttctggtatagagaggctactgctgcttttgtggagcttttcatactagctgatgatggcacttttgcaggctgtctttcctctggtgaagaaacattcctggaacaccaggtacagtattctggacaagttgcaagtctttcctgcctccagaaagcctcacagtgggagtcctgtcctgtgttgtgagaggtcatagaaatgttctgaattaattatggatgaggactctcagcaaggggtgagccaatagccagacacagagacactgtcccagaccctgtccctccagggagcagagaccctgagggagacacttaagactgtcctcaatttctacacagtcacacaccccacaggggatgtgactaagggaagagaaagatcaaagagcaaaaagtaaagccaaaggaggaggcagagaaaggtggagaaagggataaaagagagaggagggcaagggagagtaaggaaactgagaagcagggggtaggcaggagaggacagagacagagatagggaccgtaatgaggtggctgggcttctgtttcattttctctccttgttatttaaacgcctcccttactggagtgggtgggatggtgctgaggttgagctggctgctgctgtgccagtgcctccggggctgtgggttctggtctccatggaccctcaccgtgccctgcactaactcctctgaagtgtgggaacttgaaagcatccactctagacagctcagctatttcaacaaaatccatttccatcaaattatcactagtggcagtgatagaaaaattaatgatttcttgaagggactattgtatttaaatatttcaagcccgttggtgtgatgtgtgtcagcatgtgagaaacatattgactgggagccacagccaatgccggcttttataaatatcctgtcagataaataatggctctcaatggatccagtatgatgtacagttctaaagcaagcagggttttgccaggaggctcaaaggaaatgccatcacaatagcacaggctgaataatgggagttttcgtttatcttctgtaccagagaaagaagctagagaggtttgctcagcgggcaccaaggagagctgagattgagtcttcagattctgcaaagggtccagccttctgaggctactactgagagcctccagaataccaaacagcaagcaccatttgcatttgaatctctatccagcaggctggccaagttgaggcagcccaggctggctgtgctgccagggaacagctcctcttggctcagaatctcaggatcaagggagaaaaccaagtccacaaagtgccaatcaggatcaactgctgtcccagcaatgcagacatgcaatcatccacctcatatcccatcacttccctccctccttcccctaaccccttggctcattcacgtcacatgaaaacagaaacctgattaggaaaagtgaatactcttcatcttgcttcctacgaagaacaaccaacattaagtgaagggaaggatgagagaggggttagaattgctgagtggatactgtggattccccatatccacacacagctgctctgtcagaggaacactggcatggccacggtttgtcttcaaaatccatttgaggctgagaagttgcagagcatcagaattacaaacaacccaattgaaaaggagacagtcagttaacttggactcttccaacctactctgtgtttaacactgccttctcttaaagcagtcaagactatctgttctctagcaaataaacaaagttgaaaattaattcaaacatagagcagaaaatatgctgccataagtcataagaggatgaggtaaggggaaaaacaaactaggtaaatcatcagtaattcaaaagacctcatcttagctgaaatcaatttgttaataacttaagatagaatataactctcaaaaatataagtccaggttcacccacgtagttcaatggtagagccactgtcagatacatagagaactgggttctatgcccaacaatacaaaaacaaatataaacttgcataaccactatactaactatcctcggacacatgaggcacatacatgttcctcctagaaatccatctaggttaaaattgtaaagaagagaaatcacacttcatccccattgtgcctagtggtttgtttgaatgagaatggagatataattttcccacctccacaaatttcatggccacttcttttacagagtaaattaggctttgtcatataactataagcagacattgattaatgataaggcatgttctgaggaacaatgcatcatcatccagtgatgttgttgtgaggcaagcatcacaaagggtatttacacaaactacatgcacccagatggtagaacctgcaacacattgagctatatgggatataccagtctgtcattgaccagacatcattatggagttctactatgtttatatttacatcaccatctataagtcggttctcttaagaatcaaggcttttgcaagccctccacagacacagaaagccacaccatatcttgtaccaagtatagtcacactggggacctaaagagatgactctcccatcacatacaagtgatacaagataaaccttggctctccatcacatggaaacaatgacagcttcggaagaaaaacgtgattgatgcgtaacctgcctgggtctctcatatttgtaaaggaaatggccttacatgacaccagaccaaatgttccatgcttctcagttgctcagctccttggacatacttgttcaagaaaaagagaaagatgaaaaagtcacaaaaccagattcctattttcagagtctctgatcacttgtctggtttgagctcaagttggattgcctttcaactttcagtctttcaccatggtgactgatcatgcaggcagccaaaatgtccccccatcttccatgaagctattctttcaaattctcactcttcatcttactgacatgagaccgtcatatgctagagggaaatgtcagcttcctacaacctcctacaattagggggagagcttgaactaaagagcataagggacctggttcttctatgagtccatcagtagccattcctgactcctcccccaatcaaacaacacacacacacacacacacacacatacacacacacacacacacacacacacacacacacacacacacacacagtgaccatgtctgcagtgtataatgggcccaaagcccacactgttctctctcttgatggtgttagataagcaaacataaaaaattttcacttggaagctgtgaggcattgggcaatgtgccatgttctctcaaatgtgccccaaagatggaaccaaagatagaatgcctcatcctggtgccagagaccatttcctcctggatacctgaggtgctcctcggtccaaaattacatgttcattgttcttcatcctctggcctccctgtaaatatgcagtttctggaacattgcattgggtgccaagtaaaaggatattctttgcattgagaattgatagtgaagacattatttttcatacactaaaccactctttatggggtagcttccctgaaccagccatagcacctttattataccctttaaattcagcagtgaacattgttggggtctctgctgtcatgcatctcacatgcttgtttgaaggaggacaagaaagaaattgagaacagaaaaagaagccaaaataagtaaaatactcacacttgtgacaagtacattaagtgctattctgccacagcccactgagtccaggactttagagaggttgcagcagcaacacacacacacacacacacacacacacacacacacacacacacacacacacacagagacacgcgccccccacacacacacacacacacacacacacacagagccaagttcctggttcccacaatggttgctccacacagcaacacacacacatagcaaagctcctggttacagatcccacaatggctactccactgttcaaacagtgactttctgtaggttcctacttaataggtaaaagaatgtccatcctataatcacacagtccagtcaagtgtcatcactgcaattgaagtgacttctctatctgaaattccaaaatgtggggttaatgtcctatcttaattcctatcctatttttgttcacccagtgtaaggagagatgccaagagagcaggcagattaaaaatgcatgacttctcccactgccatgattccttttgcaatttttctagcagactttgagaatatggagtttttgaaggggggttttctttgttcctttattttctatgactttatagctttcaaggctttttatcttttccttcaaaatgtttgaaggctttgctatcagcctctaacaacctaaacctttgtttaccttgaaagccatttcctgtagtctcccagagactcctcaggttatgacattaccttccaacttggtttagctgccagcacttccttttccctgagctcctaacccacaaagaatgcccaggtgtccttagacctggtcacaagttatgtttgcttctttgttcttctccacgaccctgctgtcattggcagccaacccagaaagtggctgtttctacagactctccattccacatcctgttttgtttttctccagatgtctataggttttccaacccaaagtgagcaatagcttctctggaagccatttccacaccagcaggcaagccttgagactctaatgggaaattgtggaaagaggtgaagtattcacccaaagtttgcagcaggaaatggcagctctccaaactccagcagagctgtcactagacaaaggtagcaaggagaattgtttcagtgccattccccagtgccaggtgaaaggcattttagctgtgaacacagactacatcttgattttcagatgaagcatgagtttttaataactcacaccagagttttttaaaacatatggaatcaggctgggaagatgtctcagtcaataaagtgtttgttaccaagcatgagaacctgagttcgatccccagaattcatgtaaaaatgccaagtgtaatggtactcgttcacagtcctagagataggaggatttctggggcttgttgtccaatcacactagcctacttggtgagctccacaacagtgagagatgctgcctctaataactacacatacacccagagataaccaaaagaagatgggaattaccattatatatcaggcccactggtcaacaaagcataaacacagagagatctagttaccaaatcacaagagaaacttcatttcctcctccaccaatgacctgagtcaccacatattatcatttatacttatcagccaataattatctcttgcctgctactgctccagaccctagataaaaatggggtaatgaaggcttggaactcactttcaatgagtttataatcaacaactatgtgtaagacagaatgtcagaactataagtagagtgttggatcagcaaagagaagagagccagatccttagacagaagtgggaatgatccatggggaaagcagcagttgaagtcaccttgggtgagggatgatgaggatggagagcattctaaagcagaggagccaaggtagactttgtcatcttctcagcaatcttctacagctcccttttgtctgcatcaaatccccaccaaacctcaaaagcagcatcccccagaccaacctgtactgtccaacctctgggcacctgttcatgttctgtctagtgaaatatggttgactgtgaattcagtaatggggaggtcccagtatttatgatcctggtagtctcacacacgaagtaggcaacatttaaatgtctcttaagtgacagactgtgagggaaatgaagtatatgtgttaggaagtgatgatggcacacttggcacacaataatgattctatacatacttggcattcttgaagaagataaagatgatgatggtgtggaaaagcagaaaaactaaatgagagcatatcattgatgtgctttcagatgaccacactgtggcactcatgacctctctggggctgtggtatatacaagacctgcacaagaccaagccaacaacatcagtcaatattgcagcatgccacactaattgaactcattgaattacaagggggtggtgtttacaacttacttaagagctctcctagaaagaggtggtgtctatatcttccccttacactaatgggctctgtaactgctttggtcagtgaaataagctgtatgtgacagacactgtgccagtttacaagccaggatcttgacaaactggcagcttccactatctgtcatttagaacactcattcccaaaacctatttgccagacagtagtagctccagccacccaaggagagactacttgaaaacaaaccaaggctcaaatccagcactatatccccagtcgacagccagcacaaacctgttcatcgggagtaagtcatcttaggaagtgaatcctccaggctgagggcaccacctcagcttcagaggactggaagagagacaaacaacgctccaaccaaatggaaagtcatgagtaatgaaattagtgatgtcattgcaggctcttaattataaagatgtttgctgggatagcttaaatgggtctagagaaatcagttactcagtagtagagctcctaccttgcaagtccaagttctaggttcaatcctcagtaccaaaagaaagggtactaaataatgggccacctaagtccaatttcaaaaatctaaagttttccttaacttctctatatttgtaacttttcagtgtggccaattaatgaacagtctacttgccacagtttgaaccttaaaatattcctcaaagcccatttgctcaagcttagtctttgcttatctcagagtataaacttgagggcacagggcctaattaggaagaagtcaggtcatggaagatatgaccttgaaaaggattgtaggaccgctgtccctctgtcttccttttgctttgcttcgaagctcccatgagttcaacagattcctataccacttgttcctactgagatagtatgctatcttaactgcagcacaaagacaataggatgaagccccccaaactgtgagccaaaataaatctttacctttttaagataattgacttgcactatttgttataggagcagaacactgactaacacacccttcatcccaagtgaactttaaactgtggtatcatgttcaaattagatcctaccgaaatctgagtggggatagggctaagcaggaattgagccttggccttgtgtgtttcaatcaaaggtgctcctctgccatctgttttgacattctgagttgtccctaggaatccatttgaaaaggattttggagctgcaaaatgcttgaaagatgtttccctgcactattaaacccagaaaaccaaaggctgtgttttctgagaggaagtctgattacattcacgaaccagtggaacaactacttcaattgttttcagatttcaggcataacgttttctaccatctctcatatgctgggcatttttgcttctgcctgggatgcctggtacagcaaatttaactcctgaagctttcggaagctccctctctaagcgacaaagcagtgacacctgcttggaaaaattcctcccaggagtcatggatgacatttctgggaaggatcccagaatggcacattggaaattaataagcgtaccaagcaaatggctcctgtggaagctgtaccctcttgttcattcagcaaaattgtattgtcagtgtaatgacctacctgtctccctgggccactaccactgacttctggagccatttaacattatttcttataggtcgacgcttgctttagacactagcatcccatatatcctcagtcaggggtgatttacagatatataggtcagaaatacaagcgtttgggcttgccaatgaccttggttagtccggtcttccttatgactagacaagactctcctccagtgacaggtgcctgtatgcctctcagttgtgagcacgtggctgcagccttgctccctacctccataaacagccttatccttggtttcttcaagcccatcaccatggaatctttctcattatgcagccctgtaggcccctgccttcctgagtcagagcatcttgttgtgttccagatctctccccaccacacctgtctgcctgcacctccctgtaaagcaccacctgtcaactcttgatggcccatcttgatgctaggaattctccaacctgtcttcactttccagatgtcacacaatccagagtggacaatccctatccattccagcagagtcaggctctctctgggcctgccccaggacagcaagtgttattctaagatactgtttcatttctgttttagagttccttgaacaaaataccacaggctgaatgcctgcaacaacagaagctattgtctcatggttctcaggctaggaacttgaagcctaaaatcaagatgtcaacagtgtccattccttccaagagccgtaagttccaatatgctctccttgactctcaggattcactccgtcatctccttgggtaggcatgctgtcgaccctctatgtgcatgtctctgtcactcttattctaaggcctcattgaattagtgcccaccctaatgactttgttttaactatctctgagaagatcgtgtctctaaatgcagttatattatgaggtgtacaggtcaggacttgagcatatgaaccagaaagaacacattcacctcttcacagatgttgtgtatccctccggtccatcgtcgggcctcaggcataagtgtgtcgcccaagctcctggcacaagagtccccttctacctgagaaactgggggaactctgggagaaaaccaatttaaaaagaaacctgacgaagcagtctggacatcacttgcatgtctgcacattctcatttcttagggggaggaaaatggagcctcagctgaaactaaaagaattctttttccttacattttatgaagatgggtgttttgtctgcatgtttgtacgcctgtccatcatgtgtatgcctggtgcgtgtggtgaccagaagagggagccagatcccctggggctggaattacagatggttgtgagccaccatgtgggtgctgggaatcaagcctaggtgcactgcaagagcaaccagtacccttcactggctgagacatctctccagcccctctttcttgtttgtttaatttgcagtttagacacacgaatcagtgctgcctcaggctcataaagaaaaaatgtatccttatcccttacctaaagtagttagctaggtacaatgacaattcaggaagcacaggggtggcagggggcacttggacaatccaggggtctggtaatcagctacctgtgacataagtcatcacatagcagatgactcctctagttcataagcattcatgagaaggtcattgagatgctcaaaattaatggtgaaggtgtaaggtacagcatatttatatctgctaaacacaatagctagcaaatgtgtgttgcctttaaatacatacagatttgtgcctaactggataagtagttagggctatgagtgtcaaaattaaaaagaggatttccacaattctaacattttaaaaaggaatgttatttggctttgccaagtcataaaggtatactttgtgggaaagggttgcactaaaatatgtgcctatcatataagtgataagccagaggccagtctccaatgtcattccttaggcgctgtccatcttatattttgagacagaatctctcattggcctggagattactgacttgactaggctagctattcatggagccacagggttcctgctgtctctacctccccagcactgagattacaagcacacaccaccatgcttggctttttcacctgggttctggagatcaaacttattcttcatgcttgtatggcaagagttctactgacagagccaacttcccagcccagagaggtcataatttaattagctcctgtcggtacattttctccactaacaccatgtaaggggaggcaggcttcagcctctttgaacaattgtaggttgtcgttttcatttaggcaaaggaattgagtgtttgcagagccacaaagaagaacactatttcactcacctgagctattatgacttcatcgaggaagcatgatcaaagccagagcctctttggttagctttgtctgggcaaacgaaattcccagaagaggaggtacatgagcatcaagagacagccagagaaccaagcagctgccaggctaactgcatcaaatcctagcgttccattgagtcccattgactcctaattgtgctccatagtaaaaggctgggctgcctgcaatgaatccatcaaccaaagtgaaaggtttttgataatcttatttttctttttgggaagaatatgagaaaaaccaaggagagaagggaaacaaagggcagaaatccagaggctaaattacaagtttatgaaccctggaaacagtattagcctactcacattccaaccgagtgtctacattctattggatttctctccagcttagatagggcgggcgccatgctctatgctcgactgccttctagagtgttgttatttaatagttgacatattccgccagctgtggcagccattcccacagaggtttcacattagcttaattttcaaagctttgcaaaaaattctctagtttaacagaagtgatacacagaggtagggagtttaatcaaggttgttcttaatagagatatgactcacaagtgatgcccagtgtggacatcctgacctggcacctcgacaggatagatactcagcaggaagtaccgcctttcacatccacagtgcccacaagtgttgccttatactcagtcatggcacatattttcaaatatatccctaactatatctgagaatatgcatcttcagaaccaagttcaagtctgtaaggagaccaacccttctgccatgctactttgtgaataaacacacagctgaatcctcactctgagctcagtggtcattctggtggttgcccaggagttacatgggactcagaaaatcagcacctggactggtgagatgagccagaaggcaaaggtccctgctgtcaagcctgatgacttgagttcaatccccaggacccacatggtggaaggagagaaccaactctcacaagttgtcctctctacaatgtgtatatacatgcccacatccattaataaatgtaattttttaatgtctaaagaacggttgcagtgtgttttatttgcttgactgtgttgttttgttttgtgtttggtcttgagacaggatctcactttgtagccctgaatgaacttttttttttgttttgttttgttttgttttgctttgagacagggtttctctatgtaacagacctggctgccctgaaactcactctggagaccaggctggcctccaactcagagatctgcctgcctctgcctcctgagtgctgggattaaaggtgtgcaccaccattgcctggatgataataataattttaagacgaaagaaattctgcagaggctgctgtacagatcaggaggtagaatcaaatgctcttttccaggcggttccaccacagcacatccatgcctccatcttgtcatttgtgacactccgctgtcttgtaggatgttcggagagtgcacagggccctgtcatcttaattatgaagcagactgcgcctttaaaagctgcctgtggctatttctgctttctaggttgtgcaacagaatttatcttcaggggagaattgtttctctgtctttttttttttaatttgggaaaacactgaagtatactttttaatctgcagagaaaatgcccaaagcctaatatgaaaagaaggatggaacaatgtgaaaccagtgttaacaccaagccgttgggtggccttaagcacccctaggaagacagccttgccatcttacttaaaaagtcctctttgttcatccccagggaggaaggtgcctgaggctctggaagaaaccacaggtgaaaggtaagaatgaaagaaagtggaccccaacataagatggtcaccagccaggaccgggacatgtacttgtgaaatatcaatagccggtgttcatttaggcccatcgttctcacacagtagcctctaaactgctactgtggtctgtctgttcaccaccgcctcacaacagcacagccactgaaggaagaaggtgtatttggggaaaactggtgcacaaggaggcagagcaactgtgcaaatacagagaaaaggtgaagagggagtgcatgccagagcagtggccaggaaaagtgacagcactggagcatagaggcatgcaccactatatttgatcaagaaaatacttaccccggaagactggacactgtgtctatttcagtggctctggggaatcaaactcaaaccttgaactcgataggcaagtgctctatccctaaagctacactacagtcctgaaagactttttgttctctttgggttatatttattagtttagcaatcagtagccttctaggcacattgaagatgcactgaaaatattgggtaagtggttgattgaatggaatggaatggagtggaataaagaaatgggttttgtttcaatgtggtctcaagtctatactcttcctggcaagttgcatcatgtcacattgtatttctttcttatacttactttgcttttacaatgtcttcaggagatagagaagactctaaatacaaagaaaacacacctccccaacccttagtcccaaatgcaaagtgctgatcttggtaaaacagggaggaatattggctaatcagcctaagatgtcatagacctcatattgggtcctatgcatgctcctcagggcagcctcccatcacaccgatggcctaaaaggacattatgctgggaaggcttggtccaagagctcctggttttcactccagagagtcttaaggtgacaagcaactcagcagggagtggtcaggggacttctcctaccacagggagcctctgggagtccttggaagtcaggaagaaagcaataggcctgtacaagcttccgggccagaggccttcaggagcccaaggtcagcaaccttccatttcagaatgctcatccagcatgaagccactgtccctcagacactactctctcacaaagaaatttgaaaacttttgcattgcctgctgtgacccctgcacgcttcctccttctttggcttacttctattcttcagaagtcattggattttgtcctatgaagcacaaaagtgtcgcccttctctgcggtggctgaaaagttaaggtcacaggaaatcccaacatgcacagagaagcccaggtgtgacccacactaaaaacagagagtacagacttcactgcagtgtgccaggggcctgcatgctgacgcgtgcctgagttgccagtgagtaggcctgcaggcatgtggaaggaggcgggcaacagggcaccactgggaattctcggctctcctgtttactattttaagtgcctctgcaaagaatatgagaggcagaaaggtcctggctgtgagctgcccacaactgctcctagcacaaagacttgacaagaggtagggaaattacagaattaatgatgaaacaggagggagatcaaaagagggatggaacaagctgagactgggaatgaatgtgttcatactctccatcctaaggggtgaagaagacagggggcacaggacacaggagagacaccaaggtgcacacatcagagtgttttaatcatgggggacaaaaccaacaaagcacaggtgagcattgtcaggaagagattcgctgttggttaagaaattatattcagactttgtgttattcaaatgagcactcctgtctctaggtacacaaaagaaaaaatttgactttctaatatatttgaaactactagtctggtttccaagatagaaacatgaaagtatcaagtcctgggttggggatgtagttcagagtctgaaatgtgtgaatctatgggatcaaatcctaatactgcatagaccaggtgtgatagcacacatctatagtcctagcacttgggggatagagacaggagaaccagaggttcaaggccatcctgagctgtatagtaaatcccacatcagacaaacaagaacaataaccatgcaagcttgatgatccagatcactggaacccacataaaggtggaaagaaatagcagattctgcaaagttgcccttggaccttcacaagcactcatggcgagcatgcactcacacaccaccaccaccaccaccaccatcatcatatgtacacagcaataatacctaatatttctgggtgttcctggcacacgccttcaatccaagcactcaggaggcagaggcaggtggatctctctgagttcaaggtcagcctggtctccaaaatgcgtgccaggataggctccaaagctacacagagaaaccctgtctcaaaaaaccaaaataataataataataataataatacctagtacctagtatttcttaagtaactttgaattcacatttttcttaaccttctatttaaatatgttggggagtgagcctgatgcttgtgtttaagatattatttatcgtcacaaccagaacacagttcaaatgcagtattctgggcctattacaatactcttgcagatgcctagagcacaaaagccacagttaaagaactactgtgctatgctgaagcaatgagcctcttgcttttgtgtatgaattactattaagaaaagctaaaggtgggctgtgaatgtagctgagttggtagagagcttacctagcacgtgcaaagcccttgggttccatctccaaaactaaatacaccaggtgtggtggcagccacacctgttattccagaatgcgggagttattccagagtaaaggatcagaagttcaagctcatggtcagctatgcagcttgttcaaggcaatcctgggatacatggaactgtttcgaatacaggaactagagagatggcacagtggtcaagagcaaccttagttcaaatcaacatacacacccccatttaaaagccaggagtggccacatgcatctgcaaccccagcactgtggtaagatagacacaaagggagcacttgggacttgctggccaatcaacctagctccagtttcagtgtgagaccctattccaaaggactaaagaaagtgatggacagggccatctaatgtctgcctccagcttggcacatgccttggtgggcacacacacacacacgagcatataccacatacacaaaatgcatacactacatgtcacacatatgtggatgtgtggatgtggggttgttaaagatgaaaatgaataagaatgtgatgcatttagaagaaatactataaaataggaaaacagaacatctaaatgctattagtaaatttacctgcagtgttactaatcaactaaatactatttacttataaagccaatatttagatttattctctttttaaggaaagaacaaataagacagtgctctaaagcacaggaaaaaacaaagtgggtttttttccaaggaattgttgctactgttgcataaccttaaaaagcaacactgcctaatttctcttgctaataatacctgccaaacagagactcagtactgttggctaaagtgtaagtgtgccaagacaagcagcaactcacaaccagcctgaggaaaagtcttgaaaatcatgctctgattgaagggaaatttccatgccttcagaagtatgttcagtgtggagagacgggtcagccagtaaggcacttttcacaaatgcttgaagatgtgagtgtgactccccaggagccatgtaaatagctggatgcaggccagtgagatgctcagcaggtcaaggcacttgattccaaaaccaatgacttgggttcaataccttggacccacatgtggaaagagagaaccaagtccttcaagttctcagacctccacatatacaccattgcataagtaagtacacacacagcactgcataagtgagtggccacatacacacaccatggcatggattgagcgaatgtttacatacatgcatgcacacataccatggcatgaatgagtgctcacatacacacacacacacacacacacacacacacacagagagagagagagagagagagagagagagagagagagttacagctagatatactacttaatgtaagtcacttgttcataggcagatatgaaatatgaaggcagaatgttagtttcagcatgatgtactaaaaatctcacaggaaaccaattctgagtacagatccatttcccatgcctaaatctcctgaaaatagaaatagaaattcaatccccagcaatagctttctctaaccacaagaccttactctaaatctgagacaaagtaaatgttatctttatgagattacccccaaactaccaggtccatggttctgatacaaattcggggtgatgccacaggctaaagacagtgcaagtgccaccctgttctgtggagaccctgtgagcatctgctttccatgattggttatgtgtgccaagggatgcagccatgaggaagacagtaagatttctcaccagggacttgtttacatttgtactgtcagttctaataggtttttattgaattaaattcttcttccctcattagagtcctgattgcttgtccttgagtgtgatgtgtttgaattcccacagggtgttagacccttctccatcttatatactgcccagcagggatcaagaacaaggctcagttagaatttgggcataatcctggactgatgctacatggcttgtaccaaacttttcctttttggccaccaaccagctccaaaatcatgacatggagacttaacattagcttggcccagcttagctctcatttctagctagctcttataacttattctgtttgtcttcatctacatttacctcagggcttttttccctttctttctgtatgtcctactttcctgcttctcgtgtctggctggctggtggctgcctggcttctgaccccaagcctgtgcctctctttctccattgttctcttctctcttctcttgttctacgcaagcctagatttcccctatttattatctctacctgccagtcccacctatccctctctctacctagctactgaccattcatctctttattagaccaatcaggtgccttgggcaggcaaggtgaaacaaatgtaactcatcttttcattattagcaaaggcagcataaacaaatgtaacacactttcacacagttaatgtaatattccacagcataagcaaatgtgacacatctttacatagttgaatattccacaacaatggcttaaatatgagatgccccccttaggcccatgtgtctaaacacccggtccctagcaagctacactatttgaaaaggtcatcgaacctttacaaagtagagtcttgctgggggtgaaccttgaggttttatagcctgcacctccttgctgtgcaccctccactttgtaactactgacacgtgacaagctggcctcatgtgtccaccttcacaccttcctgaccatgacagagtctatcactctgaaactctaaatcaaaagaaatgctttctcccctgggttgctttccttggggtattctatccctgcaatagaaagaaaagtagaccaaatacctttcaaaaaataaaataacttaccattcttctgccattggctcattctgtgccactggcacaactgtgatgacccacagccatccagcatcagcatggaaatatggcacagctggccctcctacaaactgcacccacaacaacatgcacaagcaaaatggccagagcccaaaaccctcgagaacaatatcacctgagtcatggtttttgaggtaagaattactcctacaaacatagtggaaggcagagaaaacacgtggacaccgaggagggcagatagttctctgctccatgcgaaaagagatctttcagattgatggtcacatgccccgagcactcgtctactaagcacaacttacaccttgttcatttaatgattacaactcaaagaggagtaatgcctgcacccacttcccatgtgcccctgtggaagaaactggggtttggaaagtaattcttccatgttcacattcaaggcatgacccagaccttggtccggtggtttaggcttttagttcctccctctaattcctaccctggccctgggcaggagatcctatactcactgaaatgacaggccaggagcattggagacacagaaatggtccagctccggagaaagagtagaactcacaagtagattccaacacagagacctcagagttcaaatgcacttcccaatcaggcatattcatattttagaatttgctgtttcttcagtaattatgtgaagagctattagagtttgctacctaataatttatggcaagacacaaacactctctcactcatttacctctagtttccagccaagaaagcaaaaggtagtccataaaactatgattggaggatatatttaactaccagatctctgcatctctatacctcaacattttaacatttttataactctcctgatttctcacagtttcatggcctgggtttcttactgccctcccttaagaatccaaatcagtattctggaccctgggactgtgttctgacataagttctacaggccatcaaaatgagaatctctgtgatggttaaccctggttgtcacctagagcttgcctgtgagaatgtttcctgagaagattaactgaaggaggcaaacctgctctcagtatgggcacctcccagcaggcagccaaggatgccaacagcccttgttgaactacccaaatcttacagcataagccaatctaataaatctactttaataacatacctacattcttttagttctgttcttctacagtccctgacatgaataacaagctttgcaattagatatcaatcagtcatgatctgtctgtctgaagagaaaatccaaagagatggccttgggatggaaggccaggagagaggccaggatacaaagagagaaccaccttctcagtgctatttaatttttctccaagaaacctgtagtcagttgtactggtgaatctgaaaatttcctcctgttataggcaaacagttagtctagggagagtagcgtgtaagttcagcatttgtttgttaatgtattttattcatataattgaagctcaagtagcttggcttaagacctgctattgaaactgggcattggcagcacatgcctttaatcccagcactccagaggcagaggcaggtggatctctgtgagttctagaccagcctggtctacaagagttaattccaagacagcccccaaagccacagagaaatcctgtctcaaaaaaaaaaaaaaaaaaaaaaaaaaaaaacctgctattgtctagtcttctgcttcaatgactgttttcaaccatgcccctttcaggaagccaaacagggtattttctcttgctcttttctttcttgttcccagtctctctcttcactctgagcatcccagccttcctgagaaacccatccatacattgtgtctaggatgcatccttctgttttttttccttgccttgcatctcaggatgccttctattctaatatcattcctttccccaccactcacaggctcacagtttggtacccaagctgctttctgttcattggcatctagccttgaattccattctgccacaggagttagctctaagtcaggcagtaaatgagctctttacaaacctcgcttaatttaaagaaccatccctgtgagctgcatttctgcagacatttctcaaggcattagcaaccaggctatatgcacttgcttgtacaacagcagattggctgctgttcctgtcactctgagcactcaatggtctgcctcaaattaactagcaaggtaaaccacaggagccagagagagattgtagagacttggggcttttattgttgttattgttgtttttctcctcttgtttgtgaaactttagcacctaggatatgctgaagtggtgtgggatggtggtagcagaatagtgagtttgttgagttgagggagagttgaatgttggaagatgaaggctccttagttgtgattctatcactctgcttaaattgggagaattgtggtaactcagtctttcatttttattcctgtggtacttcatctcctatgccttcagtgtgtgtatacacatgtgcagctgtgcatgctggaatgcatgttcgtgtatgtgagagagagagagagagagagagagagagagagagagagagtgtgtgtgtgtgtgtgtgtgtgtgtgtgtgtgtgtgcgtgcaagtgtgtaatctgccagtttgttttttacttgagttctggggatcaatatctttttcctcgtgtatagtttagagcataatttgctttacaaggctagtttttcacaagcttgttatcaaagacaaactgtcacctggttctgtctgtgtaccaagtctccaatcaacttgggaacattatgccaaagagggccagaaaatgcaggactcagtggcaacatcacagaagatggcccagtaccaggaagtgcagcacatggggacaacatcacagtatatgattcagtaacaggcagggtagcactcagtggcaccatcacagccgattggcctgacattcatttggggagagtatgcttttcactgtgattaaagtcatttgccaaggatataaggactcctaacagtaaaaggaaaattccattctctggtcctttctcataactgagctgtatcttcgatgtgtagggggtgatagtgaaaaactagaggacatggtagaaaaaaaaatggagctctaacagtagtgagggtgggggagtcctttgtgtgctagcacaacaatcaagccacacacagagaccagcatctccgctggacattatgggtaaggcccaatctttcactgcccaatagagtatccactggccatagataactgttgaactttacattaattcaaattaaaaattcagtcccttaattgcactggccacggttcaggtgctaatggccacatttggtcactgcctaccgtgttggacacaacagacaataacatctaaagtcatcacatgaggatctccagacttccaacctctaataaattccagactaatgaagcttcctgacctgtagcttcaatggggagccattctcaaggcaaaggggaaagccttacaaggctattagagaaagagaatccacatggccctagagaagcagccaggaggcccaaccacagctttctaacaggaacattgagaacactcttgcaggaactggagagatgccagagattggagcatcttcttccaaaattgtcggcttcccccctcccccagcctgagggctcaccagggagttacaaggaggagagtgagttcctcctataaattaaaattcagtagaggtcagtcctagcactcggggcctgggaagtcaagagtgccaacatgattacataattgaactgtctcacctcgcccagtcaagctagattccaaggagggtaattaatcttcctgatgcctgttagtccctgccctgttcatgtttctgcccctgctcaaagtcaagtttcccaacctggaagggaagaaatgggggtgggggaggacaacctccatgcagagggggaactttaatctggttttgtgaaatccatgcacaaaactaggattaaggctgtaattgaatgtaaatgtgtatgcaaatatcagagaagcaaaagtatcttatctttcaaaaaaactctcagtcattgtgactctgcaagcccagagagaaaacaaacaacacttgaggcacagccaagtggacgggccatccttgtgtggcccacattagtcactagtcaagagcaaagccgagaaaggagacaggcatgcttatggctgcagtgttgaaataagctcattcactctacaaatattcatcaagcagttggcagcaggtactcactgtgctgagcctgggatctacccctgagcaaggaaagtggtggagtttcagtttctagtgtcaaaggatggatttgttcttagtgtgacataggggtccatttcaaagatgcaaaacattcacatattttcattctgtatcacctcctgcagagccacagttttactcctcagaaagtatatccacgaggatgcctcatcagaactataatcctagggaagggccaggaccctgtgttgtaagtctttgtggggcttcagtcagatccagctgacttgccaggttcgtgcctgagagggggaatatggattgagaaacagcaggtaaagatgctaaggaaaagacagagacacagaagagtcaggaaggcaatccagtgaatactggacaccccaagtttattcttcaacatccttaaataccccaaccaaaaaggcaaaaacttctttttcaagatacaaggaagaaacagactttcttccttaattctccaaacatttggtaacccatcttaagactaaatttctcttgtctgtccttgaagtttaagagtaaccacacctcaagcaagtctcttattatttagataagacatccaccaccaagatcaaacattctacagtagccatatcttagacctttaggtcttataactttaaccttggaagattaaagatagttttgaactctctgaccttaagccaagatgaagcgaagccatttttgtgggccccgacaaccatgaaaatcaggaacccagtttggcaccaagggtaactttccagccaagctcacctcacttccactgaacttcacaaactgaccaggcacaccaaggggcaacccacagaaggtctggctttaccttgaaggagagcaggtccttggcagtaatgcaagaacaatgagctgagaaaggcaaatcgaagaaaaaacagaaagtataaaatgtaatctcactacgtatccaccaccacccctaagcatgtatttatgaactgacgtgatatggcccagagagtcttaatactacaatattaaattccaaacacagaagacacaaaggcggcacattataacaaagagagcttgggttctgtgttgttggttttctggtgcttgctaatgttctggtttttagctttgctcacatagatgttatgttcctttaaagggctgccttcctgggagactgttttccaaccaaagtgcaatgctgccccctggtgtctgaatgccatgagcgcgcacgcagaaacctagcttccccaaagccgactccggttctacccagatttcattttgccatttttccatcttccaaagtgcaactatttcatctttaaagattcactgctcgggggtattttctggcttacacgctaatcaacacgctattttctcctataacaggaaccgtgctctggttacttaacgagggggagttgtgggtatgtggcagctttctcccctttttgctttataaattaagtgatctccccagagaagctcagaaatcaggcctattccatgtaacctttagaatcttcactgcgattctcgctggggagacgttctccgagagctcaagctccaggagatcaatgcctgggtctgacagacatcccactcctagccaaatgtatttgatttcagttcatccttcagttcttgtaccggggaataaactgaaaccaaaagctctgaaaatagcaatgcaggtgaaacacagagctggggaaagactccttcctgggttgcaaaaaagcaaaactccccacttagagaaaagcacgctgcatgaaaataccaagaaggactagtggaaggttcaggggcagctggcttcaccatccctctggatccagccaccaacgtgcccctccagccaacaacatgcccctgtgttaataacctgagaatctgtggaaatgcatgttgaagagggccatacagagctactgaatactgaactctgggcataggactaagaagcctgcccttaccaaggttctccatgacttactgcatacaaaactttgtaagccactgagcaatatttaataagattttaaatctccattaagaagttattgttgttagggattgtcgaatactgcaaagatacaaacaacacacacacacacacacacacacacacacacacacacgcctgccactgccttcctttgatttttctatcaaattaaaaagatattacctggcaacccgaggacacaaacactgataatcaccaaccaaagtcatgatcgacatttggtaattgctgatgataatttctaatggaatttgcaaaaccaatgataatccttttaaaagtccatcagtgaaaaacaaactaattcgttctggggaaacagtcaccggatctgaggatcaggaagcctggagatatttgcagagcatttttgccttgaaagaaagggacctaaccaaaaatcagcaagggaagagaaagaggaatgaggaggagggaaggtggtaaatggggaaaggggagagagaaggagtgaaaggagggaggggaaatttcgaactgactgatagtcaccttttgtagctctctgaacaacctgccagtcttagtactgcctcttgctcacctccctctcaggcagccattgtctgcctcttgctcacctccctctcaggcggccattgtttgcctctatcattcttctataaccacttgtcacccggtcctgctccaggccatggtgaaaacagagtatcttgccaagcccagctgcaatgccagcacagccggctgcccggtacacaggctagcatggttaagcggtgccaggcccaacaggttgtatttcactttccccctttaagtcctgactgagccacaggaggtgggaacacggaatggaaaaggttgtgttttgcctgaaggacattgcatgatgttaacagagggtctgttactcttctacctgtctgacctgccaacagtcactagggggatgtgcaaaaggaaaaaggaaggggcagattgaaaacctttcacactgtgcagagaggtggcaccccggcttctcggggctgggattcccggagaaactaacattcagaagaagcctccctctgagtctcccaccggagaaaatgctacagtggaaatcaaaacctgcccaactatcaagaaacacaaagaacagtgactgcgtgggggggggggaggtctggaagcatgatgacactagcagaagggctttttgttttagtttggggacaggtacaggagccatgtcaagtgcatttgttctggaagagaaatggaatattaccctaatcctaagaacctatgactaagttccccacacagcagaggagatgtttgcagatgtggttagttaaaagactggtgtggggagggtatcctggaggaacaaagaggtccgttaatcccagggtccttctaaagcaacagcaggagagtctgaacaggagatgtttcaggaagacatgggctggggtgaggcaatcgccagatttcctgacgggaggagaatgcccatccaagggatgtgggcctcttctaaagactgggaagacaacagagttgaccaacccctagagtgctcatagtcctctagagtgtctatctgtaaggtggacctatgacaggataaaacccactttaggtttctttaaggttttattttatcctcaaatatatatatatatatatatatatagaagagtcttgatttcctggagctggaatcacagactgttgtgaactgacatgtgggtgctaggaactgaacttgggtcttctgcaaaagcagtacatgctctttactgctgaaccatttctctagccctctgggacccattttggacctcagactcccagaaacacaaaatactaaatctgtgttcttctaaaccactaaattgggtgtaggggtagactctaacagtcaataggaaagtaacagtctccatgccctttctgaagagaactgttgagttgagttctgaagagagagttgttatttggtatttttcaagaactgacaatctacaagacactcaaagtcagtgaaattctggggtatgactaaaatcagacacagtttatagcactgagcattgagcactagaacaaatgactttgaatatatcctcctagaggaagtattattaagaattcatcacaaagtgttccagaatgaatgaactatacttgtggaagaagcctggcagtgattttaattgtttctaatgtctttgcatctcatgatttaacaaatcatggacaactgacatagaaacaatgaatatgagagatcattccattaaaatggactttgtgaccttcatatctaccagatggaccaagatattttgtatggtgtgtgtgtgtgtgtgtgtgtgtgtgtgtgtgtgtgtgtgtgtgtgtgtgtgtgtacatatgtacatatacatatgggaacatgtcacatcccaatcacagaagtccatggaaaatatgagggtatagaaaagccttcagagagcatgacttccctcccccaagagagtaagccaagcagactgtgacttgaacaggaaatcgtacccttgaactaacctctgagggctgtctcttcctgcctacctcagcaaagaggctggagtggaatagccctcaacagaagggacatggaagacctttctcttttataaccaagacaactggatactccgctcatgtttcagtccttattcagatatttataagtggaaagtaagctgggtgtggtagctccggcagttggtcccagcatttgagagacagaggcaggtggatctctgagttcaaggccagcctggtctgcagaatgagttccagcacagccactttctagcattagtcacttgcaacacagtttctcgatgagtctgggatagggtggcagccagcaagctcctggggaatcctcttgtctctgccagcccccagcattagcttccaagaatacttcatcttttatatggtgcaggggatttgaactcagttcctcatgcttgctcagtaagctttcttactcatgaggtatctcactccagtaagtgtttcttaaaaaataatctgattttgttcaaaccccatggaaacaaccaaagtcccagaggcttttctttcagtgtttaaggtgtccttcccagaagagttgaagtcttgcctttcccttccattttgttttcttgtgttttagattaactgtgtcttgggagctggccagggataataagagtgtgtggaagggagaaaaggtagaaaatgaagagacagggaaagaatcacccaggcaatcagaaaaacaaatcatccatctctctagctaaggttgaggataaacaaggagcccacacaacacagggcaggctggtgcagcaggaaccatggctctaagctgcagaaactgatggacctctaacttctccatagcagtaagtaccaaagatgaggctgtgtgcctctcctacaaataatagggaaaaattgctcgcaatcatctctaatgggttgtcagtttcatgacagtgggcttgacaattagtttgtcaatttctaactaaatgtaaaaataatgataatctcctcaggagcctttgcttggcctggcagcctttcacctgaggccaggaagtgaactccactggcttgtgcatatttctcatgcccgctattaggcctaaaattaatccactgcactcaggctctgaggaagattccacaggacagcttggctatcccctccttcctttcctggaccccctaatcgaaaccaaaagagacctttcactccaccccttacatatgccctaagtccaagatgagtcttttaaaacacttgacttctggcctgctgatagggaattaatttctagaagtagatgctgtgtctgccaaaaacacgtttgcatttcccttcccagtcttctaacaggcacagcccacagcctgctctgaggaggttacacaagcccccatgaggggaagttatggagagaaaaatgacaaggagaggatccaaacatcccctgaagtacaaggcctggtgcctcagacctgagcaggagatgagttttcctggctggccctggcccagatacttccagcaaatgccatcaatgctttgtgttcttcttccattcttgagagaaaatcatgccaaaccctattactgctgtgcctcagagcacttcagagaaaatactctgtgaattcaaacccaggcaccatgttattaagattttcactcaatggctgcattctttctttctaaggtttgaggtattctgccagcccctagccacctgctcacaatgatggacagaagcaaggaggatagacagggtgtccctgccaaggacacatggtgaaccagcaaacttcaaagcaaattcctcctcctgattcttgaatgtgaactccctgcattaaaaagattggaggcctatggctttctactcacagcctactcagtggtccttaggcaaagtgcccctggaatgagaaaaaccagaagagcttgcttcactctgggaccagagctatcacaataccataggtacgcaattctccgggacccttctctggcaattcagtgaaaaccatagaccctccttattcagattgcagccttcatgccttgtgacacataaactccattgtcattgcaagggaacaagtctatttcatcccagcatcaaccacagagctcaaccctacattccatccaactaattgcctaattaattaactgcaattgccatgatgacaatggtagtcagtgcagtgattccattttacagatgagaaacctaggcctccctgagaggggtaatggttttcccaggtgacgcagctatgtagctaggagttcaaacctcttggactctaataccctgaagtacccccgcttccacttcatccgatgaagttgtctaccctctccttgaggttgcctgtcatttcctttgccaccactgcccttttctgtgggccctcgggttgacttatacaatagctcatattcatagaagccatttgtttccttatacagaaagaaaatgaagctgaaaagaagaaaggagatagggagagaagggaacatggggaggaatttgtgaacagcacatcctcaagagagaaaaagcaaactaacggaatcaaaccagcaaggtccagagagagcatgcatttagcctctgcagaagagggagctggatgagctgcagagcccagactcagcctgcttggtcctgccacttgccaatgttgctgcagaccaccctatagggattctgctgtggatgctgagcagaagctggaagaaatgcctgactccaggagagctgcttccctgtgctgcaccaagcctgggggaagcagaccagtacattcccacctgttctatttgcagcatcccaaaccttcagtatttcccacctacaaggagctagagaaaggcagtgctgcaaagataaaaactttccagttcagaggtaagcagtgtgagcgagcgcatgtgtgtgtggtgtgtgtgtgtgtgtgtgtgtgtgtgtgtgtgtgtgtgtgtgagagagagagagagagagagagagagagagagagagagaggaagagggagagagagagactgtgtgtgactctgtatgtgtgactctgtatgtacgtgtgtgtgtgactctctgtgtgtgactctgtgtgtaactctgtgtgcgtggctctgtctgtgtgatactgtgtatctgactatatgtgtgactgtgtgtgtgactgtacgtctgactgtgcttctgactctgagtatgtttgactctgtatgtgtgtgtgaatctgtgtgtgtgtgtgtgtgtgtgtgtgtgtgtgtgtatacccacacatgtgcttgtgcacatggagaacagagaacagccttgggtttcaagagccttccaccaatcttaggttggtctcgctggcctggagcacactgattaagctaggctggctgacccaggagtcccaaggatgaatctgtctctgtcttcctggcactgaagttgagattacaccacacccagcttttatttttaattaatttttattttttacataggttctggggattgtacttgggtccaatgttacatatactatactacttgtggatagactttaccaactgagccatcttaccatccatcccatagcatgcctgaaatgttaagtgaaaagttttactctatagtctgctatatgttttcccgtaaggccctggtgaatgcctgatcatcagcacttaagcagggagcatctcacagggtcagacacagagaaaatcagttctccatcctctcgggctcctgtgtctccacagaacacaattacctcctcgaagatctttactacacccagcctggggtgccccagctagctcaagagaaaataggaccttttagaggcaaagagctctctgtctatccagactgtcactacagcaagggaagaatttgaaagtatgtatatacaccactgaagcaaatcaagaatggcttctgtgctgcacgtccttgtccctgctttaacaaaagtaggcccctcctttggcccacattatgcaggggggaaaaaaagaggtttatataaaggatcacctatttgccacttctttattctattacaggcaggagcagaggctgacacccacaaggaccctttccagtgagggattatatatcatgccatagaaatacataaaagacaaattatcctgagatcatcatgcttccattgacctgctcaaggtttaaagccagctgcaattagatgccatggtcgcagatctgcaggcggcttaaaacgccagtcacgtgctttaatcctacagaaacagacccgggtggattttatgggtacctaagtttggattctgtgggtctgatcctgattcgtaggaggttagtaatctgcttttgttaacgaggtcctcctcaacttctgagatatttataatatgatatctaattcaggcttaaaacactcatgaaaattaactgcattgctttttaaaaacacaaccagggagagagatggcaagggaaagcagcatgatgtgctaaaatcttatcactctcccacattcaccagagagttctcccagctgctgtggctgacaaatctcacagaagctaatgtgccattccttaagtcagacctgcctttctgacatgggggctaccgactattgtaacaggagaaattgaaaatctagccacatgggagcatatagatttcatttattttaacacttaaaaagcatgtaagacacctgttgtaaagatcttagggcatggtagaaatggctaccaagttagtgattgccacacccttttgtcttcaattataaccattcccttattaggtgtgtcctatgtacctagcatggttgtgagcactttacatagtaattcacaactaactgatgagctggtaggagaagaaagggaccccaagctatacagctaacactggttaactcacagattttgaacccctcacccattatccatctgatatgctacttgcttcacactgatacttctaagagagacagagacccattagatcatgacaaccatgttccctaaacattaactatgctttaaatatcttaatttatgagtttaataaaaaagccagctaggtgcattccgggactatgatgtaaaagatggatctgtccaaacattcgagaaatatggctgcagagttctaaaatgaaagaattgcctgttcagagcacaaggatgtaagtgtgttcctccaccaagacaggtcagcatcctgtcttcaaagaacaccagtcctttgggccaaagatctaatttcttcacagtttcagagtgaacccaactccatctcagagacaggagagaaacaaacagcagtggacaaacccacaatcccatggcattcctctcccatgaaaattaggtctgccaaatggtccatagcagaacactgtccgcctcagtatctcccaaggctgattttctctgaggtcagcatggtacctgaagggcaatgttgaacgtgaaatcagaatgtgagatgtgggttaatgctcctgggggcagctcatccacaaatctacttccacaagaatgtcttgtgactcagacctgactgaatccaattgtctggggcttcctctcctttaaactatgttctgaaagggcaggtttctgagacccctcattgtctatgcctttgtctgagccacacttgttttttttttcttttatcctttattttattaggaattttccaacaaaaaatggcaagttgaccaagttgacacctagtaaatatttctgctgcaggtaatttcctataggtgtctgcgcacgcctttaatcccagcactcgggaggcagacgcaggcagatctctgtgagttcgagaccagcctggtctacaagagctagttccaggacagcctccaaaaccacagagaaaccctgtctcgaaaaacaaaaaacaaaaaacaaaaaacaaaaaaaaaaacaaaaggcttgcaagttaattgtagcatctctgtctttaaataccttttgtaggcaaataactattccccctctagtttccaaacgcattattttcaccaacaaatttggatcaggaattgttgtggcacagctagtttgagtaccaggtatcaacatgaaacttaagtacagtcattcttggtgcatttggctggttcccagccattcagttctagtacatagaggcacacattattttttttctcccacatctgcagagatccttttagaatcaatgagaattacaggctgttagcacagtggagaagtctcgtaagactttattgtgtcctttgattttttttttgggggggggtgatatacaaagagtgttctagaactgactgcaataacttttcacagttgtaaaggacttcagtcacctagctgaacactcctcactcccaatttacacacagaggcttcaagactctacattattagaataagaatagttaatggtagagtggtggaaagatagtttagataacacagtacaagcaataaggcccgagttcaatctccagaacttgtgacaaaagctggataggatggtgaatgcttttaatcccagttctgggaaggcagagatggtgagccacacttcttctcattgaaaaatccttgtcttgctttcttggatatcaccgtgttgttattgattgatagctctctgggctttggtgaaaggggggctaaactttaagacacccccagtggggttccaatggaagcaaactttgagatagatatctattaaggaatgagtttatgactgccaacaaagacagggggaaaggaataggggaagcaaggcagtaccaaccaagcccaagccagcccaccaaggattcaggaactggatgttatgctgtccagtgttgtcccgagatggtgtgaagtattgggtctttgtgcatatccaatgaggagtcattggatggtctccctgaaaagtgggcaaggctgcttgctcttcaggtgacgcaattcagaagttctctgggtagccagagaagtccttccctcccgaagggtaagtggacaatcttccaaagcctctacaacaaagaatagccctgtcctcttgaagcaaactttacctaatcccatccacattgcaaaccagagaaagactgagcatggggagagtgaggcaggctaaatctgctcttctacagccaaggatacaccaggactacaagccatttccaaagctaggctcctaatacacccaaaactttgctgaccttcccccatcactgaaaaacctttccaaccctgatgttccttcctctgccataaacaatccaccatcctctcctccagacctaagctcagatggatctgccaagggatctcactgctctctgcccttctccatggttctcccagagatcagcactgagactgaggaatggctggtatttggtaaacaaacagataaataagtaacagatgaattcttgtacctcagggcaacaccaaaacaatgagaagaggctcaggcagacctccagttctgagatggctccaagaatgatccatccactacagataaactatgtccagctggtttaggtaccccagcaagatgtccctccaacatgtgcccctagcacagcactaagttaatagccttatatatacctattggtttgcttttgtttttttgtttgtattttcaaattatacttaattacatgtgacatcagaagccatttctgtctgattcattgttttatctcccagcacctggcccagggctggcacatagtattcaagaaaatatgtgctcaataaataaaacagaaagtacagcatttagttagaaagttctgtgaactgctttcaaatttacactggcataaaatgaaacatatgagaggtttaatagcctccaacagagctgcaaacaaaagggcgggaatcggaatatctgagaggagtataggagccctagagataatgctttagtgacagaagagtcatctcttccattaaaagagttaggaggtgattgacacattgcaggatagccatcattgattatagtcatagctactacactaaaccaaggacataccaagtccaacaggggctaagcatgttaaatatacaatatcattaaaccttcatagatgactggaatgtaggaattcttatgcccacttttcagataatgacatcaaggctcaacgaaattcagatacctattccagcttaaaacttactagttagacacagaacaaaagtctaaacccaactttgtctgactacaacacctgtgctcaaactaaactccgtggtgaacatcctctcaccaaacaatcgggatcctagtcacagagtattcagtgcaatatgtgggcacaaattgtgaagttgatattatgatagccaggcttttaaatagcttaccacttacccagcttgcacacatcacacccacagaaaaagagagtggagttaattataagatctcactggttgaaggaagcattcatttgcaaatctcaactgccatgtttttagaattggcacccctatgtctctgttgttgtgaaaaacattgactaaagccaacctgaggaggaagggacttatctggcttacacttccacatcacagcccacaaacagggaagtcagggcaggaactcaaaacaggaacctgttggcaggatctgaaacagagaccatgaaggaatgttgcttactggcttgttcatgacttgctcagcctgctttcttattcaacccagaactacctgcccaagggtagtgagactcatggtgggctgtgccttcccatagcaatcatcaatcaagaaaatgccccacagacttacccacaggcaaatctgacaaagacaagtcctcagtcacagctttctcttcccaaatgactctagtttgtgtcaagttaataaaaactaaccctcacaccctacaagattcggatattggaatttgccatttggggcaatagtagtacaaggtgggcctttgggaggtgactagttcgtgaatgagaatagaccccttgtgaaaacatcccaaaagaacttccttgtcccttttgccacatgagaatacaaagaaggatcaaccataaggaaagtccctttgcagacaccaaatatgccaactcctcgaccttgggtctcagagctccagagccataaaaggcaaattcctcttgattataaattacatggtctaaggcactcagtgatagttaccaaaataagctaacacactgactatagtctggtcactaaagccacaggaaatggaccctcctttcacatctgtctagtcaagacccatcagccatatgctgtgctttgcaaagcctacagagggcctgcaggtttcccatacgcacccggggcaatctattcacatggaaagcacaaatttaaagtgtacagctagaactgagctagacagagcatttgcctagcatgcagaagaccctgggttctgtctccagaccctgaagagaaattaaacataaaatgcatatccactcaatctacaaaacagaaagagaaaaaagaatgttcggcaatgcctctggtgatggtgctggttcaaacgaccaccagggtcaaggctacttctcattctggtttgtcacacctgaaaggaaaaggcaggtagggtgaggagatctaaagaattaatgtattaaaacattttttcttatttaattcctgtgtttccatggtaactgagccatcaaccaacaaatgtgcccgtctctccagcaaattaaaaaaaaaaaaatgttttcttcaaaggagaaaatgttagggacacatttatctaccttgatgagtaatatgtctggggagcttccaaaaacaagaagccataccttttcaatcctcccatcttcctcattcttcaacgacacatacaggaattaagtactacataaggacagaaaagctacagtatacctaggagatggctttggggcagcccttttactgaacccaaagaaattctaaagttgggatttgtttttttctctctgaacttcccagtacatggcttccaaattttcttaattatatctactgggtcaattttataatcctattactcctgtttggcctctaccaaatactgtaaatagccatgacccaaacctcaccccattctccctgctacagccctatccatcacgtgtttgtgtttccctgaggaaatggagcttctagggagtggggggcttctggagtaccctcttgctcatctgagctcagcatcctaacagtttatgtagcattatatttagtcactggttccctgtcctgctttctccttgcaactcatttcttagccctgaattccacaaaactgagtgcagccagcttgcttgatcacatgtcatggctatcctggactgtgcctaactggtgacagtcctaaggaaagttacaacaccttcagaataacagtaattgggattctccttcaaaataatattctacatacactctgtcttttagtttgttacttcccatttaaaagggaaaaggtaaacaggtagacagaaggaaggaaccacgcacagcagacacagccatggtaaaaaataaactcagccttgaagctgccagtggcaacagagaccaggcctcttgaatgcaactcctcttggggtatgttctggagttgcttccatttgaagtcccctcactagttcatccaagctgccttgtaacaaaaatgggtttctgaaggagatgggacaataggacagattcccaccataactgcaaggcccatctgtgcataagacagtttgggtaccagtaattacaaccaccttccaggaaccttgtttcctaatgtcattgtcacctctgggacctaaggaaaaaaatatccaaagcatggccctcagtgggccacaggatatagtaagtgtggggtggactgtgtggctgtgcctgtgacttttttgagagttccaccagtatttctgctgggcaagcagatctgagactcccaacctctggcagtctagtaattccaagagcacatgggaggtgccagtccccattcatcctgtacttcagctagtccaagcccatgagtggcacgagcaacagcagtgagctaactcattcttgtaccatttttctcttcctgctgtacaaactgccatgaactgaacagctaaaagacagctccagttcatgaccttgtgtttatgggggtcagaagcctgaaatcctttttgagagctaaaaccaagatggtggcagggctgtgtcccttttcaggggactaaaaggatcaccataatccatgcccttgtctttctagcttcggtttctagaagccaacatggtctgaagtaccagccagcaatgacatcatcattgatcctcagttctccagatcctggctctcctgcctccctcttccattcattagattcattgtaattacactgtgttgggctcaccaggataatcggagataatctctcccatctgaagatcttgaatgtaatcgcatctgcaaagccccttttgccacacaggattatatattcaccagctctctagattagatgtggatatatcggggaatggggtacattattttgctcatctgactcatcttctaggaatgttggaggatccagtcagagaatacttgtctgccaaaggactttctcattactggggcctcaaacacatctttggcttcagttgccttgctctttctgcttgcttcttatttccactctgtgtttcctggctaatggtctgctcccatttcatctctccttgtcttcacagaaacacagttctggatgagactcagtgttcacttctgaaggagatgagtctctctgtgcttggcaagcacaaaagaaaaataattccagagcatgagtttacaaactttttgtgaaacaagcttgggaaactctgccaccaaatattgtcaatcagcattcctggcacgtctgctcattagatgctatgcaagtcaagccggtctttattgttgttgaaacagcaaatctgcacgttctgtgtggttccaaatatttgtaatagtgctgctactaaatatataagtgtggcgtcggcctcagattgcaatcctctctaatagtgacagggggaatcaaacccagccatatctctctagggagttttgctcatgataatagagagctctagagggtaggtgggaggaacaattgtgcaactgaggggataggatgaaggaaaaacagctggaaatacactgtggatgttgcagaaaataagaaagtttcttggaaattaaattcaaggaagatgaaattgaaagcatgaagagataaaaatgctcaccgattttgaaaaagcatgcttaagaaaaggtaaaatgtgtggcacattcttcttctgatgcctcttcgtcgttcctgttcagtgttggccaggtcgtctttgtttttctaacgcagcattgatcttttctattggtttgtacatctttgtgtattagggctgttaatttgccccctccaaaaaaaataaaaaataaaatacatgttacaaggagatttctcatttcttaaccttactgcagataaacttatttttttccgagtagaagatttaaatttgagtttaatcatccctatcaactttttctttatgttttgtgaatttattcttaagatcctgccaggataattaaaattccacccactagtaattaaaaatgcaaataaaagggagatttaattttgcacctatcagatccactcagtcatttcttcaacaaacattcatcaaatgccctttacatggcaagcatgggaagaaaaggcagaaaaatacaacaaaagctctgctggggggcagggggtacatttctgcttatcgggtcaagagaagcacaaacacgatgaataagtaaagtgaataatatattaaataataagcactacagaataaaagaaagctgggaagggggacagcgagtgtggtaggggacagctggccacttaaactgcatgacaggggaacagtactgcagggaactatgttggcacctgggtaaaaaagagagcacttagcatgtcccatgtggctagttacaaagggaagagcacaaataggggagagcagcaggcagggaagcttggggcctgtcaccaggggccttgtggtctgctgtaagaatacaggctttttctctaagtaaaataacacctacatgttaaaggcttaggtcccaaggtagtggaacctttaagagctgggacctagcaggaggtgtttaggtaatctctctgtcattctctctgtctctctgtctctgtctctttgtctctgtctctctcctcttcccctgacctctttctcccctcctccaaccctctatcggtccttccttccatctcccttgctctctgtccttccttcttcaccagtctttctctgcccctttctctcttcctggaaatgaggacaagagttttgttcttcccacatagtctgtgccctgctgcctcactacaagctccatggcaacagagccaactgaccatgcactggaacctccaacactagtgtgaccttttatttttaaggttgattgtcttgggtagatcttgttatgtaacaggaagctgactggcacagatagtttgggagggtattttggcatagaatgatgttattttacaaactactattttctgttttccctgttgaaatgggcatcaaaacataggacagacagcctgttgtgtgagagatggtggcttgagccatgaagtggctaagcgttgggtgtgacagccgagggagttaagccgagggagttaagcttgaagtcagtgttgaggccttcaccataggcacacagaaggatgaagcagccattaactgtgaagagcaacctacaagtggatcaggggggtgagagaaaggaagactgaggactttagtgtaaggcatgttagctttagaatgttccctaaagatccaagccaaggtgtcaggtagacaggtagacctgcagagccaagtcccccagctgtctttcatctatgagctggaggcatacttctgggagagagcacaagggtttatggaggtcatgaaactgggtggggttgcttagagacaaggattaagaacactggcaatgccaaatattagcaggagtacatggaaatccatgtgttcacatgcttctatctaaatcaggataataaaccttatggtatcaagtataaagatataagcctctgagccaatgattccatttctaggaatttgttttaataaagggactcaatagttcagtaagaatagctgatcattgtagtgaaaagctacatgtgaactgaatatagaccagaatatacaatgacaggtatagagttattttttacatggccattaaatttgcagtataaagatttttattcacatgaactgtggaatctataatctacccaacagttcagtaaatacagcataatattttgttgctgtccttaagtttaggctgtgccctaggaggggacaattgtactaatgatgagcccactccctggggtggtcagctagcactttattacaaaggctgtactccagaggcgattactaaaagccgttctgtaattcacatctctaatcaacaagaaaggttctcctaattagcatactgaatttcagaaatgggttttcataggggaaactaatggggtgctaatgagcataatggatattcaaaatgggcaattgttagtgaagtttatggattttgagaacagagaagccactaaaatgttttagggacacttgctcctcccgaatgatcccagcagaaagcatttagagagagccaaggcctgtgatgtgaggtttattccaagaacctccatccctaccaacacagactgaatccagttatctgtttcttgttgtaaaagtaagggaatactttttgagctataggatttgcctacagagcaaggactgaaactcatctaggagaaaacataacatgactttgctcaacatataaacgggtaaaacagagtgtttcactagtgagtggtcatctactgagggtgtgcacaggtgggagaacagctcggggatccattctcattgtacctgagatcaagataattccacactttggctaacattcaaatctctctctgctgccacaatgttaaatctcaattgtcaactggtaaggtgaccctctgtgcatgctggtggggattaacttgctaagattcactggagtggaaagacctatgtaccataggtggcaccatgaccctagactgtagggaaaggggaaagtgagctgagcaccagcattcatcgctctcttcctcctgactaggcatgcaatgtgaaccatctgctacagtctctccactgtaatggactgaactgtgagccaagtgagccccttctcccttaggtggtttgtgtcagggtgttttatggaaacttcaggaaaagtgactaaaacacatggctatacttttaactccagaaaaaccccaagtattgtaggattcaggcaaatactgcacagggacatatcagaagtagaagtgagacaaggccatcttccccaagtatgctggggatgagggcaccacaatgggggaagaaatagctgataattgggtatgttcttataatgagaaaaagaaaacataaagcttaaaaaaaactgtcctttaaaaattaaaagtaaatctaggcagtggtagtgcatgcctttaatcccagcacttgagaggttgaggcaggcagatctccatgagttcaaggccaacaagttctaggacagccagagctgttacacaaagaaagcttgtctcaaaaaaaaaaacaaaaaaaaaaacaaaaaaaaaaacaaataaataaataaataaaagtgcaaataggaagtagagggaacaaaaatgtggagagacggtgtgttgaggaaggaaatacctacagagttctactacccagacaatcaaaatctgatattccatctccattcctgtttctactcttttattttgacgttttattttctaatcagatttgagacttaaatacctagaacattactttctttccaccctctgaggatcaggcatcgtatccctgaaactgaacatgtgcacacacacaaacttggaaatatctacattatgttgttctcttctttccccccgaggcagacagcactatcaaatttatttcccatctttgttttgagtgcttagatgttattttggattgttcaagtgttttatgatcccggaatctgcctttcccttcgctttttgtcccttccctgcatgaataaagcaggctctgactgatttccctagacacctccttcggttcctatctgatgttcttgcctgccttttccagctctccctctctcttcttatcccttttctctggcaatctaggctctgagagaatcatagaatgttaaggaacagcctaaagagaagataaatgtcccaagaaaatttcatggcctaattagtacaccccgaaattaaaaacacagcaagtttttataagcccacattcaccctcaatgaggactgaaagaaaataataattaaaacaaggctttccagaagcaccatccccctggctttaaatgggctaaataaggcaggaagactaaaacccaaatgcagggatgcaccagaccccaagatgagaatgtaaccaaatgccacttcctcacacagctcatacaaaaagacttgattttcagctcaccaattcctgtttggaagagtgtgtattgccacacagattattccattttcaaaaatctccactgccctacaaaacagcagaagggaaattgctggcagggggtgggctgtaagaccccagatgcctgacccttttagctgctttaagtggcttgcctgtttcctttctgcatcttcttgcccctcccactgttgtgactgttgtctctgctttgcaaggacatgtcactttaagtacccacttgctccccccttcttaattggcctgcagtaaaaatacaaattgcaccactgtacttttattattagccatttgatgggccaaaaaatgcctcctaactactgcctagagggtattaatcagacctgctgactcctaagcacccactttataccttgactccgagatgaggccagtaggtagtaatcatggccccttcccaagggatcatttagctggtcactgcctctccatcaagaaaggcacagcctaaaggtgtggtggctgacctgcatgatctaagtacacagccccaactcctccgttgcccattagctttaatgccagttgttctttatggacatggaaagtctgcctccttctctaggtactagggcaccgagtgaatgtcttgcatcttaaagcaccagctaagcttcataatcttctctgccagctcacggcttggcaagtacagcctccttccttgaagcaaacccccctggggaaactggcagcagagaagagggtgggggaatgaggttgactgagttagggcagaggcctcaggggtactgtctgccctgctgtttccaacccctgaatcccactgtacatttcagccctcactcagatcctatactgaagctctgctggtgttgaaaaggtgatgggggaagtggaagatttctgcttcacaaagcttgattcctcttattaaactcaccacaaactgtctgcggtcagctatctcacgaatccacatcatcgccatgtgtgttctgaaacactggaatggaggacacaggcacaaactgtttcaatggaataagaagcaatgaaatattcaaataaagtcacaaagtcaccatggtccaatctctgccttcattactcattcagtaagttctttatacacagtggccatcctggataccagacactgcctcatttctcgctgaccttactagggcatgccacagataggcttggaatataccacagaactttcgttttcgtactcaattaccaagtcagagcaactcctatgattctgtctcaaggtctgttctctcctcagatattcttacctctagtttctgtttatatatgttcatgatttctgacccttaggagaccacaccaagttttaaaagggcatttcagctccaaagagagacttcagctatcatatatgcaatgagtaatcatccacttagaagaacttccagaatgatctttgttttcaggtgttacagtggttttcattgccatcaacgaagagtagaaatccctgagcaatgccttgttctcctacattccaggtccttgcagatcagtccacatatgttcaacacactggagattacatgctatgttcctaaggcggtggttcttaacctatgggttgtgacccctttggtggggtcacatagcagctatcctgtatatcagatattgacattatgattcataacataatgaaatagtagcaaaataccagttaggaggtagcaactaaataattttacggttgggtcagcacaacatgagggattgtattaaagggtcgcagtatcagaaaggttgagaaccactgctctaaagaaaattacatctcaataagcccatagaacagaggccctaacaaaacgcatgaaacagcgatgaaaattacaaaaggaatgaggaacagtgagcaagaaagaacaaagctgcttcttaacaatagcataaagaaaatgacatcagctgctgcctagcatgtgggaggtcctgggttttgtcacgggggaggggggagaaaatttgagaggaagagaaatggaagaagggaagaagtggggggaggagaaaccagagaagtaaaagcaagagtcaggaagcattcccatgggaaagaagagaggaaaaaaaaaaaataaggaatagactcttactaaatgtggtggtttgaatgagaatggccctcataggctcaaagatttgaatacttggagggagagggactatttgattaggaggtgtggccttcttggacaaaatgtgtcactgaggggttgggctttgaagttttaaaaagcccattccaagctgagagcctctttctgcctgctgcctgcagatctggatgtagacctctcagctactgctccagcaccacatcggcctgcatgccaccatgctccccaccacaatcataatggactaagccagtcctaaataaatgcattactttgtaaaagttgctgtggtcatggtgtctcttcacagcaataaaacagtgactaagaccaaaagcaagggagatcccactggacccaggtaagttagtgactaacagcatgtattagacagtttaccacttacaaaaccactctagagtaggcacagtaggcatctgttcccttataattaccctacatctcacacagacctggatagatggacagttagctaggtggctaggtaaaataactaaggacctttggggtacactctctaggacatcctcatactcatagggatggcatcaagggaaaggaagctctaccaggaaatcagtaaagacaaaagacagaatgagagcaggacgtggaccttcctggatgctatcctgggaggtctcccctgtgacttcagtgaaggccaccgctcctctcacaggggcaaaccccgtggaatgattccttcttacaatctaggtaacaaaatgcagcttgtacactacgctcttccagtcctgtggtggtggtgactggaaattgcaaccgcaagctcctgagtcatgactcctgcctgtcctgtcccacaccttcacactgagtcctcctagacttcccttacatcatccccactgagtgttccattagtttctcgtgaggatcctgacttacacagacaagcgtttggggtttgtgaagagaagcgaatatttggattcatgaaattgtttgttctaccattttcaattcatgtttgcaaacctttagcacaggaagaaaacagaagcagcctattgcattcattccccaacatctagggcagaaatagatccataaagattgtgttctactatttgtaatagccagaaactagaagcagcctagatgcccctccactgaaaaatagatagagaaaatgtggtacatttacacaatggagtnnnnnnnnnnnnnnnnnnnnnnnnnnnnnnnnnnnnnnnnnnnnnnnnnnnnnnnnnnnnnnnnnnnnnnnnnnnnnnnnnnnnnnnnnnnnnnnnnnnnnnnnnnnnnnnnnnnnnnnnnnnnnnnagtaaaggattaccagcctacaatccgcactaccagagaagctaataaacaaggaggaccctaagagagacatacatggtcccctggagaaggggaaaggttcaagattccctgagcaaattgggagctcgggaagaggggggagggagctaggagaatgagaaggggagaagagcgtgtgcaggacacaagggagcagaaaggttgagtcaggagaagaatggaagataacaagaatggagaaaccataatagagggatacattttagatttacagagaaatcaggcactagggaaatgtctggagatnnnnnnnnnnnnnnnnnnnnnnnnnnnnnnnnnnnnnnnnnnnnnnnnnnnnnnnnnnnnnnnnnnnnnnnnnnnnnnnnnnnnnnnnnnnnnnnnnnnnnnnnnnnnnnnnnnnnnnnnagaagcagacacccacaactaatcactgaactaaactggaatccagatgcagagaaggatgagtgaagagcaaaggggtccagaccaggctggtgaaacccacagaaacagctgacctgaacagtggtaagctcttgctccccagactgatagctggtatacctatagcatgggactgatccagaccccaagaacatgggtttcagtgagggaacctcggaaatctacgggacctcctgtagtagttcagtacttatccctagcataggtgtggactttgggagctcattccatatagaggaatactccctgagccaagacacatgggggtgggcctaggccctatcccaaaggatatgatagactctgatgacaccttatggaaggcctcaccatccagagtgagcagaaaggatatgtgataggtagagttttagttgttgggggtgggggtggtaggggaggacaggggggagaagggaactgggattgtcatgtaaaacaatcttgtttctaattcaaataaaaaaatctgaaaaaaacaaataaataaataaataaaaacaaaaaataaaaaaagattatgttctagaaacttccatttaaaacaataaaacaggcaggggttcaaaaaaaagttatgctagcagatctaacagctcctcatccatgctaagcaagcaatcgcactatattcacagcttgcttcactattttaaggctgaagacccatcttggtctataacctgtttgtgtacaaacacaagtgtccttggccctcctacaactgtgatcttcagctagtccaaatgtaggtcagagtccaatttctggattaacaacacatccaaagtcgaacatgaattcagaacaaattatccaagtaaaatgcttctccccaaagtccacgtgtattaattacttttgctttcagggactggaagagaggccagtgtagggaatgaacggtttatttggattcaccgtttccagggatttcagtccattatgtggggaaggcttgtggtggaagcaactctgcccatggtggtgggagtgtgatctgcatttgttcatgtgcctcaccaggagcaccgtaactgtcaaaggcctgtccctggtaacctgccctcaccagccaggcccccacatcctaaggctccaacccccaaactggcatcacaagctggggaatggatattcaagtcatgggccttcaagtgcatttcagattcaagccgtgacccccttgtcaaccttcctttaatacagttcctcaagttgtggtgatccccaaccataaaactaactttgatggtatttcttaactgtagttttgctactgttatgaatcataaggtaaatatttttggagacagatgtttgtcaaaggtgtcatgatccaggttgaaagccactgccctagacaaataagacactgtttgctccacccatttcgaatgatcaatgttgttcagacctcagaggagagatgtcaactttctattcacaagaagtttctcttataaggcaagtatcccagcgtgggcattcccacaccatgtcacctgacctctgtgaactcccaaacaaagaatggtcagacccaatcataaaaggaattcagccagccagattcagccatcctcgtaacccaccccaactcttagaggtgtaactttggaggaagttcacaccagctacttgacatgtctttttatattgtctgttacaggaaatttttttcttgacctgattttgtaatcactttgcttagcaagcaccatatttggaagtcttgggctttctattccacggaagctcctgaaaatagagatattcttcttagtcacatacagcaaatgtctcgtttctacctctaaatagtctaggttaattgcttcacttaataactcgcagcagtgaatcctacagcctaatttaatatcactctaggaaaaaaggaatccctttctgtaaaattgggcttccaggttagaccagaggagaaaggcaatacgtgttaacatttgcctattccccagatagatgtggtcttggctaatggtctccacagtgaaagaagggcacatctcactctcccattcaggaaaccaactcaacatgtgtgtgtcaccgggaggaagtcagctctgtaaggcgaagtgagagaagcttgtatctctgtatataaatcacgtctctttgcagtgacaagtcgtgtccaggcaaagcttattacaaattcagtttgaaatctcaagaaggaataggagagaaataacaacagctttatggagccatcctcaggaaatgacttgaactcatcccaattttaaagttccctctatacaacaagcagctaaaaccccattttgtgggggaactgcccgtacagggaaggtgtggcgaagccatctgctgctttaaactgatagtttccagccttgttttcctggtccagctatgaaattgcactaaccacagagacaggctgcttggccaggaagctgtgtgtgccagatacaagtgaatttaagcccgcatgtattgaagctgcaagcttactttgcaatttatgtgcaagtggtttttggatttattgatctggaccgagtgcaagtcctataggggaagtatgacagatttcatctgtctgacagccaagtctaattgtgttttcagtctgaaatgaccaaagacaaaagtgcacatgtctcaggtcttcactctggtgccatatggagtattagatacagggctgtggtcactgtaagtgttcgttttaataactagacacacactgaatcctgagcagggcacgcaggagaggtgagtttttaatgcaaatgtgaattaataggccatctgatcctgcctgaatgtgggtgggccattttaaagagtgtctttttatagacatgattgggggaatttaaaagatgtgtcatatattactgattcatctgcaccgtgaaacatccaagccaaaagtcaagtacttcccacaatggctgtcactaaaattatatccaatacttctgggaaagctagcatgataaaaaaaaatcaaagagcatcttctagaatcttactacctagttttgaagattaacagtgcccaagagaatatgagctataatttctccctgcagccatctctctctgtctctgggtatctatgtctccctctgtctccatctcactcatcctcatgcacacacataacgcatgtgtgcacataacatgagtaaactcaccaacacacacactgttttatagaggccattatctgactatagacagtggacattaatgcatatgttgggagaatgtcatctcatgtcaacatgagctgggttctccagagggtcaggcaagactgagtgtggatttaccagtcttttccagatgatttcagactctttcccttccctttagtgacaccacaacaccccacaagccctccttcctctctaccccctctcctggcttcttccccctaagtgtgcacgtgatgtaaaggagtgtgaacaccttagataacttctctaatcctatatttgtcatcttttaaaatggtactatcatagtagacagaaaatatggaggtttgctaagaaaattcaaatcattaatattaaaaacaaagtgtgctctgatgcctgtcacctgccttttttagactacgtcaacaaatcttacctgttcattgttacggcatctcccagagtcacatctgtgatgccaactccttttctactgttcattctattaacccagttatcacctgccaatctattattgttccatattcttccaagtcccaggacctggatttgctagttatgctccaagttcagcttattggttacttttctattgctgcaataaaacaccacagccagaagctacttacaaaaggaagattttatttgagggtacagttccagaaaataagagtccatcatggtgagcaggcagggcagcaaacgtcaagcatgacaacggcaggagcggaaattgagccctcatgtctcaaccacaagcactaaacaaggaaagagaattgaaagtagctaaggcttttaatcatcaaagccctgctgtgatgtacttcctccttcgaggctacaccacctcaccctccacaaacagcatccccaactggcaagcaagtatccaaatgctcaaggctatgggacatctcttactcaaacctcaacattcagtaccaatataacacttcactgtatcagcctgtccactctgccaggcagcctcttcctatctttctcttctactgagctgcgtcaccaccatcactacagccagttaggtgggacagccacatacttgcactactttcctttatcatccccaaggacactttaagttgatcttgtgtcttgttcctataggacaaatcaccacaaatttagtatcttcatataacccgaatgccttgtcttattgtgttgcaggtcagaagctggaaatgagtttcacagagctcatttgaaggagttggcaaggttatatcttctagaggagttttgtttccttggttttcagtcgcagcctctggggtctactgcattctccacctatggcctcctttctctatcctcagagcccgcagagccctccagctacctccagcttctctcccacttagtagcattcctgtaataatatgcacccagcagatgctacagaaaatctctctgtctagactcttagccttaatcactctgttctcaaaggagtctatggaataggatattaaaatctggggagaagtaggaatgaaaacattattttactttctacatcttccttgccaacctttttttttataatactgccccttatttttctatgcataccagccccactaatgcctacataaatcctcaaataaaccagttatttttgtcatacaacctttgttatcctggtccttcttcagttcatgcactcctaactatcatcaaggcaggccaagagctccagtcaaacatgaatactcatagcatcatatatttgctgtaagcccatgtcatggttttctattatatttgcatgattatttggttagtgtctgcctattcacccagactgagaaaacatagaaagaacattcctgatttttcccaacttcattctagaccataaagcacaaagttaacatttgatgattattttctcagtgatgaaatcagtcctgttgaccctgaactatggggggtaaacatggtaacatgtatagttactctacacaacacacacacacacacacacacacacacacacacacacacacaatttattagaatttacaatgagccataagttgtcttacttcatctgatcctattcacatattctatagagtaggaattcaatggccaactagtaatagaaagcacaaagctagtcaggaccttctttggtgcaccagaacatggacaaggaaaggctaaaggaaaaactcagaagaaaaaaacttaatgcagagtggagacattgccagattccatccacttaataaaaatgtagcacctgggtttattcatcccccaccagcccttcaacaaatttaagtgaagctaaccatccaatcaggttaatgccaacacttggaagtgaggaagtcaattctccttacaaggctgtggtacaatcagaacaaaaccaaaaagcagcagcagcagcagctggagagctgccagtcccccaagaaaagccaagagacttggctgagttcagcatatgcagcaatagaagtcggaggccaagagaacacgatcaagtctccacagagatgacccagcttcatctagaagaatcttctgagaaagcaaatagtgaagggatagaagaaccccagaagtatgttaaactgcagtggaagaaacacaggacaaatccagaagtccttgcagtttcaggaggacttagggtgagaatgtctgtgcatacccaatccccagccagaaaaggaaattaattccactcatcctgcagttacccatattgggatccctggaggttgtgggttctatccaagaaagaattcaatggtagacgggagaaattttggtgagaacaagcttattggaccaaagttttaaagtatactctgaaggcacaaagagaacatgaactagaggaaaaacaaaaacaaacaaacaaaaaatcctgcttttgtggcagagtgaggtgtattaggattggatctgtgtaccataagtctttcccattctggaggcaggggagtctttttgatgctggatagtcaaaccagccctgtcttggtgtgtggataatgaagactttgctcagtcttgatgctaaccacctgttaatcagcccaaaggtgtttaaccatcactatgggtgtaatcctactgctgggactttccattctgtgagggtcatatgccaacaggatgcagctgtaagccattagtgtctctgtggacacttgtatgactggaccaggatgtggtgtagcaacagaatccaagtgattgttttccctcagttgtttcctaacacccacattaatacaagacatcaccacgatgcaggtcaacccagctacccaatcacgtcttaacaaacagggaagccctacacaagcactagagaatttgtctagcatgtgagaattcccagattcatctctgaatagggtaaatctctgtagagaaaagtgtggtacttttttaaaggggcctaaacatttactccaggaatttgtctactttagagaaacaaccatggaagagatcaaataaagattgaaatttgaaggatgtatataatgtgtgtttggtctttcctctttaagcctttgaatacactgagttttgggagtgcctttgaatcgtgagcctgtttatgctaatgaacagacaggataggtagagagcctagagggattcagggtgggggttgaagaccagaagtatctaatattcctttcaccattagccccaccacatacctccagagatgagaaagaagttggatatttaattatgaaaactcttcaataacacaggccttgctttcctcctgtctctgaaatggtggaaatgtgtgcaactcacccctaatcctgtgggtgggagttaacttcagggttagaacaaattcaattatttgatgcccattggtgtcagagatctggagaattgcttagtgtcagaaaagacattgtatatttggtgtcagagagaatcagacagatgaggataaaatcggagatggaaggcaattgcattttttgatggggagaactagggtcattcaagaaaccggaaatgctactttcacacagggaaccctgcaggtgaaactggccagataggtcccaattgtcagcctgggatttggatacttctttatactttgagtttaaattaagatggtgccagcttttttcaacatttgagcttctcttatcacaaaggaaacttctagcaaagacagcaatagcaaatttataaaatgtatgtacatatcaagaaagaaagcaattatcttttgtttgcttcagattttcatttgttttattttctggagttgttttagacttgagacaggatctcacaacacagtccaggagttttgatcctccagcctcagcctcccaagtgtagaatcagcattctactaccacacagctgtaactttttgttgttcataaacacacatatgaacattggtaattagcatggatgtatacaatacttatgacatttacatacaacttcattggcttttcaccacatagccaatgtttgtctttagagctttcatgctaaagatcttaatcgtgacctcaataattttaaactaaagtgttaactccaggacactttcatgagcaccttatgttagcttttcttagcggagctgttggctgctatatgccgtgacattaataactttctcttccttctttctgtgtctgttgagacagggtctcaatatgtagtccttgatggcctggaacctgctatgaacttgtagcaatcctcctgtctcagccacaacattaacaattttgaaagaaatgaattgagattaggatccttcctacatgaaaaattactgtcaactcaactgaaacaaattctaagttcagcccttaatgcttattttcatgggcttaaaaggtgcatttttgcacagtaggacagctgatcattgtgttgtcaggaatagataagcactttattgatcaagatggaatcccaccaaaactgtataccatcaacatcgcgctcccacacagtggttgacctggtaaaaacaggccaattacttacagccttattaaacagggctgagtacaaagtgagtacacatatagtcttataaactgagtcatgctttggggaggggaggcagtaaggggatggatgataaaacacgagccctgaagccagcctgcctgagcaggagtgccagctgagaggttcaggatctcagtgtggacaagggaagtctctccacaaacatcctcttgtgtctaagccatacaggagcacttggcactgtgtaaattcaaaattgatttgttttatcatttcctcttgctgcagtgccacaaacagctgattttcttttgcagtctctaaaagaagcaggggaggcggttgtccccatgaacatccaatgattcatcctcgttcaagtgtaacccatgggagatgctgccaataacatgctttccttcttatcttcagttctcagcagacaacattttgtctatattttttacaaagagtcataaatttttcagttagtgtacaaataataacactgtgtaatttccatttggtctctgtccttggggttttgggagaggagaaggaaaacagggttgctttagttgacgttggcagtggggggttgtgatttctgcagcctactggggagtgcagggagaggttgggggaaggaacatgtgtgtagttgtaaatccttagatgcactgtcaaagcagcaggcttcaggtagccagaggactccactgattgtccccgtgacaaggccagagtgacaaggccagagcaggggactaggatggtcagcctcctgcaatcactaacagtgctctgatggacaatgcctggaaacatgaatccctgactctttctctgccccaacctctgtcaaattatttcaccaaaactgaggaaaaaataattttcaggattactgtatgatttggttactacttcaagaaaattgcctaatacggcatggtaggtacacaaagtgttatctctcaacattctagtgactgtccttgggtatgagactgactatctacagcaatcctgcaggactgtcatgcaagtgacaatcacaggtaataagctctcagcccaaatctgcttaaacataacttaattccaattatggccatcccaacagttcacaaaaagacatgtttgagctacaactggtatttgggagaacaagtgcaaatctctccatgtgtccagaatgaaattgggtcctattacttggtgacaatagtagggccagccattgccaattagtgagattctggccggagctctgcacagcccttctttaatttgaaggaaatagttggaggatgcaaatcaacattgttttctacaactccaccagtcccagatataggaactcaagtccccaacatgggccccttccctaacccacagcctgacccctggtggtcttttatctaagagaccaacattcactatgccacacaaggacaatattccctatatttctctccattccaaggcttggagtagcttctcttctttgctttgctcacctccctacccaccagtcaagagcccctttcccagggtctattccagtcattttcccttctcggatgaagaaaagcattcactctgaggcactctttgaagcaataaacagcttacttctttgtggaaaaataggcaattttcgagtaacctttggaagcatctaaataacccacacatatttatggctgagtgactcttcggattgaagaaactttcagcctgcgtttgcaaagatttccattaacgttttttgagcagcctctcatctcattttaaaacaaatggctagctagcagaagagaaatttggtttgtttgtttcaggctttctctctctctctctcctccttcagcttgccagtgatttgatgcatgcatgaagcagcagcagaagttcaaatggtaactctttgcccaaagagctccaggtcagaggctcatggtgtcataggtcagccttcttctctcattttaaaagaacctccacttcactttgtccacttgttccttcttgcagggataattcctcaaggaagtgagggggctccgggctttctcccacccccacaatgcctcaggaagtactttttaaaaggttctctctcaggagaaaatgttagatgctatatttatctccaactaatccatttctccctctactcctagattaaggaattaatggctgctacagctgctgtccttagcaattactgtaaattggttacagcctcaaaaaatatccactcatcaacaacagtgagaatccaggttctatgcagagcatcaggtacacagcctaagtaataaatcagtgtctcatagagtacaagatctacacagcctgagccctggggtttcaaccatggaggccagaggagataggtgataagggtggacatacatcatatgtacatacaacttctctcaaggcccacagtgaatcaaatattaaggaaattcccccctcattgatcagagtttgcaccacagcaagccctttaaggtcatttctcagtgtgctggctgttctaacgtctgctttaccctttgcagataggacacagtaaactctcagagttagcacgacttgtcctaccaggttcccttgcctcctgtactctggagatgacacattccatcccttagctcacacacatcctgtctcaaaatcttgccacaggccatttatatcacatctgcctatgatggttaggtattttcaaaagaccagaaccagaagaccatgttataggtagcatggataatataccatggattatcatttgtgataggaggctaagtagaatggccatgaacatactacagaaactgagaactcagcttctactccgtccaagaaactagaacatggggtaccaaccatgcagcccccatttgatgctaaaagcttaaattcttccagaagactagcagcaaaagcatggaaagcctgagtattctggagtctgatacccatggtcaatggctgtagcagtagattcgtaggaagagtggagtttgcatacattggatggatttctctgctttcacataattccatcacagaccccaaccttttggatgatactgtccacattcaggtgagtatgtctgcttcagtcactatgtcacctatcaattccctctagaaagactctcacaaacacagtgggagccaaaaattattaatgctggacacctatcactccaatcctatctataatcaaaactatctatcacactgtccaattctttacttggtacagtatggacctaaaatgtatctcagagtcacacactgatgggggatgtccttctatatgctatgaatatacacctgttgtactgtgtcatcgtgggtagctaagattttcagtgtgacaatctctttacctgtcacgtcagggtacatagtaaacaaaggctgaacatagatgagacttctccaggtagaagcctgtttggaaatttactttcagttagaccaggctgggaagcaacagagaaataaagccctgttgctccctgaggagaatctacccgtaacccgttttctttctctgtagttcacttagagtcaaacctaccacttagctgatgataacagctccttatagctttagccaaaatagcaataatctttctggttccagtttgcttgtttgacctcaccttaaaataattgctgagttggattttaaaggtctagaagaaaatcagataaaaagcatcaacagggctaatgcaatatctcaacatcactataacagtaaccacctccctatcttgaaagttcacctctagactccaaagacgccagggtgcagaggtcacagcatcctatacatggcttctaacgtaaggcagacaaccaaagctctgtctacagtcagcttgagcaacccaggttttcacttcctattacaccctgagatgtttctcttctttctctcctaccttccattacttgcttttcaatgctcaatactaattatggattttatttataaaaccgtttttgcaacatcctggggatgcagaggggaagggaggacaagaagctgaatgctgagaaagcctctaaggatgtatccattcattctttttaaaaagcgtgtttagaagtctgtgagcatgcaaggaactcaggtgtggtgatagtggtggtggtggtggtggtggtggtggtggtgtgtgtccacaggcctgtgaaggccagaggctaaaattggttgttgttcctcagcttccttccaccttgttttattgttagtggtgggtttgtttgatttttggttttgtttcattttgttttgagacagggtctcacatcagccaggagctcacaaagtaatctaggacagctgaccaataagatttagcatcctcctctctccactacctagctctggacacaagcatccagctttttaacatggattctaagggtcaaacttaggttctcgggcttaggaggaagttcactgactaagcttattgcccccactcagaacacagactttaaaggcacaaattaagagatgctccagtgttgaccagttgctctccatgagagatgctctggtgttggacagtgcactctccatgagagatgttccagtattggccagtcgctctccagcctcgatccctttgtctttatggtgccaatactgaacagagcagaggaacggtcacttcacaagcctgcctagcagaagcatcaccccaaaagcttgctgaatgtgtattccaggagcaaccacactgattaagttagagttgtccgcagagtcaacatgagaggaatttttaacatgatcctcaacaactgactagttggaagcagcatttgacagtacctctgctggctctttccaagcacatcattgtagaggtccccaccttggctgcacagggaagttgcctggggagcttcatacacaccacaatattccatccaatctggctaattcaggcagaagctacagggtggggagcaagtgtgtgcatgtgtgtcagcgtgtgtgtgtgtgtgtgtgtgtgtgtgtgtgtgtgtgnnnnnnnnnnnnnnnnnnnnnnnnnnnnnnnnnnnnnnnnnnnnnnnnnnnnnnnnnnnnnnnnnnnnnnnnnnnnnnnnnnnnnnnnnnnnnnnnnnnnnnnnnnnnnnnnnnnnnnnnnnnnnnnnnnnnnnnnnnnnnnnnnnnnnnnnnnnnnnnnnnnnnnnnnnnnnnnnnnnnnnnnnnnnnnnnnnnnnnnnnnnnnnnnnnnnnnnnnnnnnnnnnnnnnnnnnnnnnnnnnnnnnnnnnnnnnnnnnnnnnnnnnnnnnnnnnnnnnnnnnnnnnnnnnnnnnnnnnnnnnnnnnnnnnnnnnnnnnnnnnnnnnnnnnnnnnnnnnnnnnnnnnnnnnnnnnnnnnnnnnnnnnnnnnnnnnnnnnnnnnnnnnnnnnnnnnnnnnnnnnnnnnnnnnnnnnnnnnnnnnnnnnnnnnnnnnnnnnnnnnnnnnnnnnnnnnnnnnnnnnnnnnnnnnnnnnnnnnnnnnnnnnnnnnnnnnnnnnnnnnnnnnnnnnnnnnnnnnnnnnnnnnnnnnnnnnnnnnnnnnnnnnnnnnnnnnnnnnnnnnnnnnnnnnnnnnnnnnnnnnnnnnnnnnnnnnnnnnnnnnnnnnnnnnnnnnnnnnnnnnnnnnnnnnnnnnnnnnnnnnnnnnnnnnnnnnnnnnnnnnnnnnnnnnnnnnnnnnnnnnnnnnnnnnnnnnnnnnnnnnnnnnnnnnnnnnnnnnnnnnnnnnnnnnnnnnnnnnnnnnnnnnnnnnnnnnnnnnnnnnnnnnnnnnnnnnnnnnnnnnnnnnnnnnnnnnnnnnnnnnnnnnnnnnnnnnnnnnnnnnnnnnnnnnnnnnnnnnnnnnnnnnnnnnnnnnnnnnnnnnnnnnnnnnnnnnnnnnnnnnnnnnnnnnnnnnnnnnnnnnnnnnnnnnnnnnnnnnnnnnnnnnnnnnnnnnnnnnnnnnnnnnnnnnnnnnnnnnnnnnnnnnnnnnnnnnnnnnnnnnnnnnnnnnnnnnnnnnnnnnnnnnnnnnnnnnnnnnnnnnnnnnnnnnnnnnnnnnnnnnnnnnnnnnnnnnnnnnnnnnnnnnnnnnnnnnnnnnnnnnnnnnnnnnnnnnnnnnnnnnnnnnnnnnnnnnnnnnnnnnnnnnnnnnnnnnnnnnnnnnnnnnnnnnnnnnnnnnnnnnnnnnnnnnnnttttacaccccatccccatatccatccctatttacatctacagccatgaacaggaactgcaggaaagacaccatctttacatgataggccaggcacaagccacagttcttttttttttttatattttttttttttgatttgttagatttttaataagaacatggaaatcccaatcagcccttcaataaaattaaagtacagaaagtgaaattaaaagtattctacagtaaatgacttttattaaaaaaaaaaaaaaggccttgtgaacactcagaggccagagaaggatgtcatgtgttgcactgtcactctccaccttattcccatgaggccagggtctctcactgaacctggaactaaggggctagtcagcaagcccctaccctcctgtctccaacctccacagtgctggtggagtcatacccgggttttcatgtgagtgctgacatgcaaactcaggtcctcatgtttgtgcagcaagcactctttcccatggagccatcttcccagccccagtctgggaattttcactcccatccacactaccatccctatttacatctacagccatgaacaggaactgcaggaaagacaccatctttacatgataggccaggcacaagccacagttcttttttttttttatattttttttttttgatttgttagatttttaataagaacatggaaatcccaatcagcccttcaataaaattaaagtacagaaagtgaaattaaaagtattctacagtaaatgacttttattaaaaaaaaaaaaaaaaggtaactgtgaacatataaacaaggctgcagggcagtacacctggaaagagatacatttcccaatgtacctatgggccagtgaattccatcatttccaagtaaattcttaataaaaacgccactgagtaggaaagttttgctgaaaatattttcagacaaaactccaaaaaacaaaacctcttatattggaaaccaaacttcccaccccatttggagaggcaggcggagtcccaagggaacgctggtggtttgcaaacggctcctggagtcagcagtgtgcacgaaggggtagctccacagctcagacatgacacggtgctttcttggacaactgctccctcaagataaaactgagagggagtgggagagactaaaagaattctaataaaatgccaattcttttaaattacgctttggctgattttgtgctataagggacagctgatttctaaaaatcatatcttttcagagtttcattggaaggaagactagagcaacttgcctttcctcatagtccaggaaaacaactgttatttcaaaagttctaaaaatatctactttcatgaaatagtaactatttcactacaaacctatttttcactaaatacacacgtttcctaatcctggagtctcctgggaaaagctgtgggcttttcctgggtcccaaagactccagtgttcacagagagtatggggaatggctgcatccccacctcctgggatgggccaggtcagaagtcatgtgcggaaacacggccaggcttcccccaggcacatgaaatcatctttttaccagttatgatttcctccgcctccaaacacaaccccaatcagctaggcacaagaggaacagagaatgaaggtgtgcccacactcctggtttccatggtctcaaaccaggagaatgtgcaggaaagcccagcgatggtcaagcaacctggattcccaaaaggccactgaatgggaatgtaagccacagttcttaaatagattaaatgtcaaggtgctgatttacaagtctttgctagggttttaataagaaatgttcccctatgtatttgagcatttggttcctacctagtggttctttggagagattgtgaaacccttaagacacagggactagctagccaaagtaggctcctgaaggccagccttgaaggtagtgaactctgggcagaattcactgtcgccagttccagccagagctttccgctttctgcctgccaccatgacgtgcccacatccaactgttgctaccacagttggagcctctccaccatgccatctccacagtggtggaccattacctctgaagcatgagccaaagaaagccattcctcccttaaattgctctgtcaagcatttatcacaagcaaattatctaatgcagacatcttgtggattcccaatcaaaactgccataccaaagcttctagaagacctagaacaaataatccagattaattttgtttattaactttaaatttgtataagcctatttaaaatctgtgttccacattagttgcctgtgaagagaacttgcctagttggcatgcttgcttggtagatggaaggttgttctggatgttactagcctgtgtggcaggaatgcacaaaagaatggcctgctttgttctgggaacgaagaacagcctagatgtcacactgcagttggtagcaactcctgaattatgatgctgcttccatttggctcttcacttccgttcctatttgctatttattgttgcttcattcctttgtcttgtttgtgtgtgtgcattgactctccagacttgcaggttctcccctgaggaacctgactgagacaaaactcttactgcttcttctactttcaccctcagttactgcctcatagaagaaccacgcacatgtaccgtgatgctcctccaggcttcatccaggctgcattcccgcttgttgttttgttttgctttttagagacaagctttctttccctgtgcagtccaagctgcataaaattcacaatcctttgcctactcccagttttcaatatgactttcagggcatcaactccaagcaagaaatgaatggtaaaacaggaaagtggaagccatgcatgccctagagttgatccatggttgattctccactgcaggaaaattatactggaaggttgtacacacttcctagactggccaatttcctgaagaggtaagccattaaaacacttgaggagaacaaagtggaaaataatggactcttggggggggcaggggctattacatgtggcatgtgaatctgactgctgcctggaacaggatctctccatagcagcatccctcacatttcccactgggtgagtatttattgtggggctctcaggcactacaggaagttatcagcacccctcccctgtgtctactaaacaccaagaaagaagctcccccactgccacctagctgtgcagccagaaatgtctcctcaccatgctgcatgtcccttggagaggaaaagaaaattataccaggtgaagagctcttgctctggaacaaagtcctacataaaagacaatataaattggtaagagaaaatgaaaaaaattaaatcacaacctttcttcaagttaatttagtcatataacaaaataaggataattaagcacaaataatttttgaagcaagaacttaagctttttatttcctattaaaaataaacatgttccatgctgggcatagtgatatacacctgtaatcacagagctggaaaggcacagatgggaggatctcaatttgggtgctatcctgggctacacaaagagaccctcatatctggtgttttctttttggactgccaaccagctcccaaataaagacacagagacttattattaattacgaatactcggccttagcttaggcttgtcagctagctcttttaaattattttaacctgtttctattcatctacattttgcccagggacttttacctttcttttattctgtatgttctactttcctgcttcctctgtgtctggctggctggctcctggcatctccctggtgtctttttttctttcttcctcaagcctaaattcctcctcctatttacttgccttgcctagaagtctgtaggagacaccataaccacacctgcttggggctggctacaggtgtgcctgaccaagcctgccagggagtggtcagggtggcatagggaaggtttaagagtgaggagcatgcctgttcttccttttcatcctctgtttgctgtacttactgctgccctgccggctggcaaggttgctctgtaagtaaggcttttccctaataaatacccttgtatttttacctgactccgtattggtaattcagctttttattagatcaattaggtgccttaggcaggcaagataaaacagcaacacatctttacataattaaacaaatgcaacacatctttgcatagttaaacaaatattccacaacatatcctatcttaacaaaaaaaatgttgattatcattttaaaatgttaacattaaaaaaaaaaccttttagaaagtcttcagctacccagaagaggaaagacagcaggacgtaggcaggaaaataaatgtgcaagctcaatctatattttttaattgccatttatgttaaattatgattttgctatatgaaagtttaaaactcaaaaatgtaaatgaaaaacaaaaagtgaaaattaaaatatatcataagaattaacattcaacatatgaagagtttatcaataattctataaaaatgtcaaacactgagactgtgactcataagtagccagaaatacacagaaaactcacaaaagaggacatccaggaaaagagtaggaatgagcaactaaaatctccagcctcgctagaaaattaatgttttaattaaacagttttacccataaaattattgtgatttgaataagaaaagattctgcactgatgtggataagaaggaaaaggcattcaagtattgcagacatttttataattaacacaatgataagacttaaatatattcactttgcataatctgtcctaaaaaatgatactaatttttttcaagagctcaaagatgtgcattatagcattaagtaaaataatgaaaaatcaagtatcacctaaatacccaataagtaagctgtgttgcagaagttacatggtagtgatgcaatgtagtgtcatgaggccatttaaaaattgtttaaaataacaagtacaggatcatattaaaagcattactgcaaccacacacatagatataaatagtatacatagatgatagatagattatagatttatgattaatgggtagcatatatatagatgatgtagatagacagatagatagatagatagatagatagatagatagatagatagatagatagatagatacatcttttaaaggcacttaataagtaccaaatgctgacagcagcctggttgagcaaaacttttcactccttatatttcataattctaaattacttatagtacacatgtattactttcaccatggaaaacataacctcctccaaaaatgattgttttccaaaagcacactctgtgtactgaggcattaaaatcagtgcacccactccagtcatgttttcttcaaattgagctactttcacaaaacattcagatcaaaaaatgttgattgcagccaaggaaagctaatctgctctaatctaagggtcatcaccctcttggccacacgaacacctggggaagatagttctggaacacccagaagaagcttaaagttaaagagaggatttttttctttattctttagccacatttttttttcactgcacacatcaaacaggctcttctccacatgtcaacagaaaatcccaaagagagaaaataacatcaagtcagttcatgtcctaaggtaacccatttttaaaagagaaaagagaattgaataatgaatgactacctaatatacccttggtatagattaatctgatcaataatatttattattactctattccctttatcatattcatccataagacataggagaaaagcaaaatatatgacagggacttaagtctgagttggaaattaggaagaagaaaaaggtagatgaattaaagaatcactgtttatcaacaattcaagtgaaatttgggctttacatgtatctatcttagatttgttttgtataggcttttgtgttaaaatacagaaagccatagaaggtcattacagagatatgtcaaagggccacaaaggtgagaagattcttagaatcccagtcccagattaaagtaaattacacaattaaaacagtaggagaggtcttcagccatcaaaaagaggattgttctccacccagaagcagtctcctggttcttaaggagaatactttttggactatcatatatgacttcatctatccctgtattatattccaagtcacagatttcacctagaacactcttgtgtctctctcaccattctattccatcagtcttgttatagatagataggggaaacatcagtactattccaggcagaaaatgctctagagagggagatagacacagaactatgtaacgagaactctttccaccagctgcctgagttctgctgccatgtttgggcccccaaataacacacagagatttatattagttacaatgctgctggccaatgactagatttcctatctgctagcttggtcttaattatcaaccaaataacaacctatctatatatttttataaagaattatctgatcaaggactctggcagcatgtgtcctctcttgccaggatcacatggtgactcatttactagatttcccagaatcctccttctctcctagtcccgcctaacttgcttccctattgaccaacagcactttatttatcaaccaataagacaaacatatatacagaaggacttcctccatcagaactaagtggtaaaacacacatggaggttaccaaaaagagaggcaagacttgacacctagttcaatataatatggtacccaggttttctgaatcaaaaagaaaaagagaaatgggatgcatggtccaacaatcataaaggaacttctgagttaaatggggcagaatattttctgtctgggctaactcagaaaagaaatccatagaggtttgtgttatttttattttttcattgagtgtgactgggagttatagagtagaggtcaggatgaaagaggagggagagccaggtagaaagggaagaaagacagcccctctaagctttgagtactaggttattttctttctctattcaagcatgttctcttggactggaaaatgctttgttaaactgatctgaggtcgtttccatcctcatgagaaatctgatgcagtatttcatcctaaacattataaagcttggcattaaaagcttcccaaagtctattttcccctggagtcaggtaccgtttgtcatttgctcacacattccttctggcagacggctttatgatgattcccatgggcagctgtgggctggagagcatccttcacacatgacttcccacagagtccagaggccaatgggcacaaagagaaagccaggtcctggtattgatgatggctcccatttagagcatgtgtatggtatcgtctcttcatactgcttacctgagtttatcacgtactatcaaaactcagaaactcatagcctcagactcaaaaacaagtttgtatttaaaatacccactcctccctgtgagtccaggtactatttttttttttttgagtgcttactgcagccaatggtcttcaaaaacactacctcttcactgctgtctctgcatggaagcagaaaggttgtgagcaatgattgtgagcagaatatcacccaaaatatggccatcatgtggtttaaatatatgtcccccataggctaatctgctggaatacttgccccccagctgagagtactctttaggaaaattgtggatcgtatgagagacagagctttgttggaagaagtgagtcactgtgaacattgagatttcatagccaggctcagctgactgttcactctcagtttcctcagtgtagatgtctcctgctctagttgccatgtcttccatgccatggtgaagaatgcatctacctctctggaactagaagccaaaactggtcctttctcccttatgttgcttctgttagagttattttatcatgcaacaggaaaagaaactaagataggtcattatgttttctgaaacaaaaactgatatttatgggctgaagtatgcattgcattcaatacaatggagatgaggaaagagccgtccttaaaatcagaatagaaaatccatgacattggtcactggagcagcacaatcacacggggaaaatcatgcttgaactttgatttccaaataatttttaatgtttgtaggggaagccgtagccacgcctttttaggggctggctacaggtgtgcctgaccaggcttgtgagggcgtggtcagagtgacgtagtgggactgtgtttttggtttcccacttctgacaccagatattgtgggaaattaccaatacagagtcaggtagaaatataagggtatttaatagggaaaagccttccttacagagcaacctagccatcaggcatggtagaggtctgtacagcaagaagcaaagagaaaccgaaaccgaaaacgcagtcccactactctgaccacaccctcacaagcctggtcaggcacacctgtagccagcccctaagaaggcgtggctacggctttccccgttattaaatttggaagacataaagacaaggggtgaatgctagaattacatatcttagctaattaagttggcaagccacctgtgtgctttgtaaatgtagtgtgtggtgtagaagagggatgtgcttgctctgccgcaaaattccccaacacactttcaacctgaaacataaaacaaatattgagtacaaacccttctgggagttgtgggaagtgaaaagaacatacatttttttctcactttgtgacaaggaagaatagtggtgggtgagtatagagagacctgaagactgaaatagcagctttctagtctgtggtcgaggctgtggtcagaatgtgtgctgcagaggcagaaggaactggaggctgggaaacacagagaaagcaacctctaaacacaactttccagctggtgtctgaatcggagatgaagtttctgttattatctattaatgctattgattaaaccaaatgcttttatgcatccaggatatagtttgcgtttaacatatttcttttaaataaagatttttctagaccttacagcttcccgctattgaatgtcaatttttttttctgttcaaagggcaaccatgatgtagaaagggctcccaatctgggcagcaaatagggattcctgggccactggaaaaggcctctgtgaacatgaaaaccacagctgcgcaacctctagtgccttttctcctcctgtgaatggcccaggagcagactctcacagtccacagctccaacagtttttggaaccccatagtcattgtttgggaattatctctagccattccaagtactataccaaaatacctgctactgagccattgatgggtacagaaatatacttccaatggttccagagattgaaaatccagatcaagacctcagcatctttgaggtgggtttctctctatctatgtccatgttagggcctccctgatgtgtaatcatagaacagaagggtataatccagtacaggcaggaccaatattttgacattgtggcacaataatgtcatctacaatgttcatgctccaggaaagcacaacagataacaaaataacacaacaaacttcataattttgtgtcaggctacatgcaaagctatcctgagccacagattggacacacctagatagtgcccccacactgcattataagggcatagatcccactgatgagggtagaaactttatggcctaatcacctcctaaaaggcttcttggcactatcatactgagtttgaatatgaatctggggacacatacatgtaagccacgagcaagcatgaaatctgggacaccttcataggcacagtattcttagatgaggagaaactctgtgccttggggcagtgggggtggggtaagaaaacacttctggataaaatcaacccctttccaaggagagacatttctctgaccaccaaaaacaagctccagaagaaagctgggaatgaaccatcatgctaggcaagattgtgagggaagagactagcattgctccacaccgcacacatcagggttatcttcacacacaggtagattttcttcatgttgagttcaaacagtggcccacagagaaaattctagacactatgccctgggactacttgtctttaaagtcataaatacagccagacagatggctcagcaataaaagtgcctgccacacagcctaacaatggaagtttaattcctgcacctacatgatggaaggagaaaactgactttgacaagttgtcctctgacccctgaacatacacacacacacacacacacacacacacacacacacacacacacacaaataaatgtaatgaagtaaaaaacacagagatcaatgggtataatcttcctcaaggacaaggtggtggttcttttcaaaagcctttgtaatacatatgtattattagatcaagcaagttcccaactaggaatgtgtgctaaaagaaaaataaaaaaatatataagggtgcacctagaaagatgttcaagaaaataaaaaatgaaagatgtccaacctacatttcttcccaatactaaaaaggtagaaacaaccgaaaaaatccagtattggggggtgaataaataaatgaatcttagtatattggtatgtttatcatttaaaactagtgtaacagaaaaacatttaatagaatggtatgttaactacaaggaaatagtacaaaatcatatgaaaacttgatttcatatggggactctaagaaatatacaagtaaggaaaattaagaaaatcaagttctttacttcttttttaatattctggagccattttaaaaatctgtgtgaagatgtatagtctgaaatttttaaaaaagttttacaactactacttttaagtttctaacaatgaaaacttcttcaatattaattatcagcatagatgtggggataacaaagaatgaacatggttgttcctacatatttttaaatttttattgtgttgaaatttaggcttaactcaactcaaaaactgtccctttaggttgatatcgaagctaattagaattgcattttctagtgagaaaagaaggagatgcttggctccttctctgcattctcttccacattgaaactctgattaagattatttcttctgtttactagactggatagattctgtagctctaactttctcctgaagtaaaggtgttaatttgcattaactctgattacccattcgaagactgtgccggttgcatctgctatgtactgtgcagtgaacgtttgattatctgaggagacaaagacagcacaggtaataaaaatccatggagactacctaaacttcatgttagccagaagtgtcagatgtttgccaacgttgttagcaaggaacaaagccgatttgagtttaagctcacaactcccttccatatgctcaagattatgctaagaagagagatgaccagccacaggggcagccctaggtaattcctagtcgggaaaattggtttctgattaatcaagatttggcagaattggaccgcagacacgcaactgtctcactgtaaacaccaaaccaaacaataacagcagcagcaacaaaaacctactattcactgggccagggagatggctcagtgggtagtgcctaccgtgaaagtatgaggctatgagttcaaccctacacccatataaaaaagccaggtgtcatagggcacacctctaatcccagagaggaagagacaggagggatatctggggcttgctacccagccagtctagctgagtcatttagcttcacattgagtgagagacctgcctcagagaaacaaaggcaagagcaattgaggaacacacctgatgttgacctctgacctttatacagtcatccacacatgtgcacacacaccttcgtagacacaaaaaagtttccctctgttgtgtaacatgcccaggggagctcattttactcatgtgtcacagtaacatgaaccccagtacccctacacacagagaatagacagtgaactcattttctgtcatattatccccccaaatcatctaataaaaatgtctagctatgtataatttatagtcattgcaattctgtataccagattgatttagattgaaaaattgcaatgagcctcaaactcaatgtcctatgattacaacgttttggaaatgcatattcttctatgacctttcttgagtctgtgcaagccacagaggttctttactatactcccatggactcacatacaaacagaccctaacggtgcccatgattggatttaacagatatttctgatacccctatacccacacttattgttttaaaattgaaattaagaaagctacgtcgggcttttcagaccttatgaaaataccatgtctctaaaactgccttttctttaaggaatgccataaattgactgataggcatgtccctacattcactttttaagattctttcaactccataagataacagtagatttaagtttgtaggtttgtgtgtgttttttttctcccacaacaaatatgaaaaagataagttgtaccaaaattcttaggcgttttaattgactaacagccagtagtaaggtaagaaagctccctgagcagatctaacatcagaggcatggcatggctgtaagctgcctctagtgcactggagcgaagattggtggcctcttctaggcttctcaactggaaatttttagtcctttttgcaaagtgataagactttctttacctagttcatagacaatgaatgtttctctcccagaaaaaaaatcccacctccatccaaaaggaagaaattaggaagaacagcagtcaatttactcgttgctggtcttcagcaatattaagttattgccaccaaattaaaagtcaaacctgagcagccatcctcagttactttgctgtttccaggctgaggagctagcctggtgggttaaaaagtgctagacacacaagcacaagtgatccccatcacccgcctcaaaatacagaggtggtagtactctgcagagacataaagagaatgatccagccctcatgggccagccagtctagctgagtcagggagctcaggggtcagtaagagagagagactctctctctctcaaaaggagataaaggatgacacccaatatccacctctggcctccacacacacacatgcatgcacatagaacacacacaaaggaagaggaggagtaaggggaggaggaggagctactcagaaggaaaagaagttgctgatgtaggtttcttgggctaaggatttgctttccagtgccggctttcttgctttaataataggacttttctcctagagtggtaaggaactatgactttcctctctgagtgtagctatttccatcaagcctgatacttgctttctttgtatcacatcagatgcaatgaagaagagccaatacaccacgatattgttcggagatttctggcattaatttgcaagttttccagtaatttctctccaggtttttttttaagacaaacatatgcctctaacctagaaacgacccagacagacttagtaagcctttccaggtctcataaaattaagcttcaatactgactgacccatcagggctccaaaatacccctgctattccccccccaaaaaaaaagcttccaagaagtaggattggagaataaataaataaataaccaaataaataaatagtcacctacctaaacatgaaggaaggagccatatatagaccccatacacttcaggctttcaataattgctaattttaaaggaagcacatcctagtggtgatgatagagaaaactgtgccttctgtgattaaaaactatgatgctaattcatgactcaaagctttcctgaattggcaatgttctttttctcagtctttatttttaacactttccatacaccgttacctcatttcaacttgttggaatagactcagacatggcgagtttcagctccaaaggaaacgtgcacatgtctcagagccagtctgaactcacggtccagttaaaggctgcttgtcacatacatgcaagtccctacatgtagaagcctcttcaaccttgttccaaaaattgacttccatttatcctccctccccatcacatgacaagggcgcagggatggatagctgtgtgtgctcttagggcaaacagcatctgtaaagtccttttagtgagggctctgaaaatgggacacagtttagtacaagagcacaaatcaaatgaaattcggcacttcttgaatctcacaggaaattgaaaattatcacttttttaaaaacttagtgattgaaacatgtttagaaggaaaaagaattgcagattcagctgttaacttagattaaatgttcacaggacctgtccctgttatagatctctacatgtcacatgtattttaaaccaacatatgagaccaaactgggccttttatcttgctatttttaaaaaaattcagaaaatgtccagaataaaggaaaagtattttcatatattctctacagtaagattccagaaatgacccttaaattccctttatgtagttgcattagctacaagaaacaagtgttgttgtttaggttgggtttggttttgggaacaaggtctcactggggcccaggctggcctggaactcactctatagctcaggctaggggctcaggctggcctcaagatcaccacatagctcaagctagctcctaactcccagacctgtaactcacattgagtgtactgacttagcttcccatgcacctgcgttacagacaagagcccactcctggcttggtttttctttacttgcagacataatctatccagatagcaacttttcactttacctcaagcctagactgacacactctaactgggactcttcccattccaccggtaaacttctctaaagacaagtcctaactatttactttgctgccctcccgctccaagaatgggaaaacctggctctacccccaccttcagccaatctcattaatgttccccgtgaatggtggtcactcaccctcaagactgcaccaagatgacctgccccttgaggcctgtcaagtccctgacacagctgatgaccttggactcccatccctggtgctatacaaagacatttttgtgttttctgagagcagttagcacaatgccatgtactattgctttttctccccaccaattaaaagaatgcagagtgtttcagtcctatttatctttatacccataccacctgcccagcctctagaatcacctatccaatgaggcatttcaatgggggaagtgaagcagacagcccaggctgctagtttcatggcaatcaacacaggtagatttagcctaatttttgttttcaaatcacagttctgaacacatttgtccatacattcttcatcctgggctaaatgaattctatctcagaccactgtataatccaacaaactcaaactccctttgtacctgaaggggagcctgagcagagattggtgtgtgttggcagaatgcagggacatttcggggacatatctattatccctgcctcttccctcttctccatgcattttcatctctttcccaagcactggcacctcctagccatctaatcaagacaaatctttcatgcggcaattaacatacagctcatcttcaaggggaagagaaaaacaaaggctgagacaattagctgactgtgccaaacagcatggttcaccccctccagcccctgcccgcccgatccctccctccccagcttcctccaaatgcctgcttttaagtattttcacaggaaggggaaacttcattcctgctgaaaggtaagagaaaagacagcctggaaaatggtttaattgaatttcgtatgaaaaatgcttaggactatttaagacaaacgttgggcttcttgctcactggaattgcattagtggagaaagaggacaagagacactgactaatctgtagctgtcaggttagggcagaatatagcattagcaggacacagacctgcagtacaaggagagacaaggcttcccaaagtgggcactgcagagcagagaggcacactgtacttgtaatgactcagaaggtggagaaggaactcaggactctcaaggctatgtgtgccttgattacattagcacagcccatagcattatgcagaacacgcactttgattgtattagttctgaattgtctgtaaaggccactgttttatttggctccccacaacacctgcctttcctacaacatcccctaccagcatactcaagcattagtggttgggttttctaaactcttttagccattgatggctgccagcagtcaaattaaattcaaagggtttagtatagctctgggttttagctatataatttactaagaatgcccaaagcacttgcaatctaattttcagttcagcaatgaataccatttcctaacaaaatctgcctgaaatttccttttgaggctctgggaaggaaaaataaaactgtgacacctgtgtgtcttccttctggcactgactcaaaaaaaaaaaaaaatgggggaaaaaggaatccaaacctaggaaaaaagatatacctcatgtgaatgtggtacaggaaaagaaatcaaagaatggcctggtttggatggccaaggcatctggctaacgaagacatctgcattcccttttttagacttagttttttcccccactttctaaatccaatactctatctgttacatccccactattaaccagcataggcctatccaaagctgtggttctctaaaattaagcaaaaccttgggaaaaaaacaaacaaacaaacaaacctgatttgaccattcctacatttttaatgataaacttagtctgctttccgtgggaaagaagactgttaacccctaatcgtggtgtaaatttcatttctgacattcagtcctccaaaataccatgacttacgatttcctcatgagttaacttcacactccttgaaaggaaataagagagtaacaaaagcatgcagttactttgcaaggtggcaatcctcgtacccaggaatcgaaagcagacagatgatgagtttgaggccaaggcaggccatataatgagactctgttcttaaaaggcaactttaagtctatagtttaacctgcggcattgactgctttcttccatgaaaaagatagccttctgaatggggcgccaatattatcaccttcaaggcttttggaatggggggaggagaagaacgtgagagacaaaggatggggaagagtgctatgaaaagctgtcttctgcacatgacaaggctgccacactcacactctcgcagtgagtgtcattatccacaaaagatggggctcccccaacatcccaccataaaccggagaagggcaaatgaggctccactctccctggggagctatggggagctaacagttcctggggaagacttctgtgatttgaccaccattatagttgccctgttccagaaaataaccccagcccatgctcatgagaacaaccctaattaaactcagtgtatcagaaagaaaaagaaaggcatgaaaacaggagggggctttctgggatgctcaaataataattaagaaaaaattgaagatggactcttaacatgagatttgcgaaggcacaagggatagttagaaaatgtttagagtcaccagtagggtctaaaaatatccaactccattaaagcttacttttggatttccccctctctcacactggcacacaggagttctgaattctggccatatggacaaagtagctgagggcaatgcagctgacagttgccaggtgaaagaaatgcatgtgccctctccctgtcacagaaacaggatgagccactgaaggaggctgtagcaatcaaatcatcaagctgaattaatttaattaataaacagcataatttaggaagccattagagaagtcagagatgttggctatctacccagagcagtggtaatcactcaccatcaagccagctaatgtaactctagaagtcagagcgtcaaaggataaactgaaaagagccaaattcctaatggctgtaatgatctaattctgtttgttgatctcacgcctatgattttccactcaacaagcccctttatatcttacaataaactgtatagtttagctggaagcttttttgtaggtttttaaagcccaccaatgtatcagccctgccatggaaaaccaaggccaggcacagaaacctctttctctcaggtcaccatcccacctcactccctctctgcctcatccactccttaagcagtctgtgaccagtgctccgaaggtgtgacagaaaaacatgacaatggcatcaaagtcaaagctaaccaattttgtagagtgtaaatgactctactctccaagtgcccactgaacccatctctacccacttgagttcctaacgagaaagcacatttgtttgtagagcagccgacagaaaattaatgtagtcagcctttcactttccaattaatttagtgaagctgtagttaagtaatccaactctatcaagtccagatacgaaaagatcagctgcagagagacctagtagatgtgggggaaggtaggcggcatttttattttgtttttaattacattaattagggatgctgcatgccatggtgcttgtgtggaggtcaaacaccatcttgaagcagttggttgactcatcccaccagagaggttccagggatcaaactcagaccatcagacttaacagaaagcacattcactcagtgagccatcctaccaaccctagcctgtatttgtaaatgatttctgtgccaggtactttagtaggcccttacccgttgtgtatttcaatttcatctctgtgggaaccccacaaggaagaaatgatatgtctattttacataagctctctttacataggaagtttaagtaacttctaaagaaccacagaataagaatgtgtcaatgctgggacagtatccaacgtctgactccttaaattaaaaatgaagatgaatgaataataaaaattacggtgcatggttattcatgggatgcatgtatttgcctgatggggttaattatcttttctttgtgtgtgttgtgtgtgttgaagaggtgggttggaacatgcatgcttccatgcacatacagaggttttccttgtatgtgttacagggacaggtgggtacatgcatgcctctgcacacacatgaagatgacagctttcaggggttggttctctccttccaccctgtttctgaggcacagtctctcttttctttctgggctgcatattcttggctagctggtccttaagcttccaatcagttttccagagtccactttccagctcactacagggatgatggcactgcagatgcatgccatcccagccagctttgtggctgtctacatgggcagggatatcaaactcagatcatccggtttacatggaaagtacctgaagatggtttccccagacatgcctgatggctctgacaatccagtataagttttgactttgttgttattttatgaccatcttcaatgtcaccattgaactcaacctgtatccattctttttgttaccttaacattttctttctttctttcttttcttttttcttttttttttttttttttttttggcacttgctctggagaccaggctggcctcaaactcacagcgatccgcctgcctctgcctcctgagtgctgagctacacattttcttttctacattcaaagatttaggcagggaagataataaagataaggacaacttgaaaaataatgatttgcaattaattttaaactaactctgaatatggtttgttccatcttacagacacacatcacatgcatttttgatgggaataacattacaaaggattaatgtccaataaaatccacacgatggatatatgtgcatcagacatctaaaaattctccagaaagcaattacactgagtgccatctaataataaatccacaaggacagccatgatccaggctgcattgcctaacagctctgcccccacctaactccacactgcaatctttgctagacgctctatgtatgagagaacagatgttctgctttgggttgagaaatcaacggttaccattcatatgttccaaaaattcaagggcctagtgctgctgttttgaggatgctaattaattccagcccttatgctccaatgttctcacagtttcaatcaattgcaatctcaaaggacctcagtccccactatctcctttgaaagcccatggaagaaaaactaggaaatgtatatttcactgacatagcagggagaagggaatcatccgatatgctctgagtctgtatattttcccatgttggcatcattgccatcctttctgttgtatcaacttgaacatgtaggcaaagtctaggtgacaaatacaattgaaacaatgcctagagatgcctttgggccattttcttgtgtctatttaccactcaaacagactaattttggaatcatgagtttgtttgtttgttttaacctctgaatgcatttatttagatgtttgatatctgagcatttttccctctgaaaatgataaagagctgagtcctgcccaccccatggcctgccagtccagcctgcagagggcgactccactgcctcggaaattccgaaataaatagaatcaagtgttagcgctcaatggcagggtggccccagccacctccagagcagcattatggggacagtctcaaggtgtcttctgatggatgggcactgtgcagtgtgtggctgtgcaaaactgcctacagtttgtccaggaagttgcccagtgctaggatgccctcctttaaacctttgcgcttgcgggtctcagtcaccacttagctgggacggctgctgttgtcgaacgggtccccgggcagaatctgccagtggtcgaacacacactgggggaaagcttggccaccagtgttggagcgtaggtcagctgtgaaaccaaaggactcgttgaccggaaggtaggccttgactacaaacatggggtgccagccacctgggactcttcaaacacgtgaccacgcttcctgttcaggacaccatagatgccacccacgacttgttcaggacactgaatctccaccaggtagataggctccatgaggcggggctgtgcgtcaacacactggcatacagacagcgataagctgtggggatgatctggccacctcctcggtggattgcatcagcatgtagggtcacatcatggacatcaagcgcacaccacgcatgttctcgcagagagcgccctccttagtggcccactggaagccagccaccacactgtccttgatttcattcaggtactgcacacccttggtgatgtcggtaagaatgttggggccagtgccatcaggcccaaagcgccagatcttgcgggcttcagcaacatcccactagtacttttcatctaggtagcgtgcgcgtgccttgagctcctgtcgagcagacacttcactcttgtcgatgtcctcggccaagccatcagggaaggcccaggcccttcatatgcaatcggttgtgcttgttgggcgatttggacaggcacagcacatttgactcctcgctcaccgtctcccggtatgagacaacagggtcagatttcttgatggggatgcacgtgtggtcctcctccaggtccttgaggcagatttccaggtgcagctcacctgctccagcaatgatgtgctccccagactcctcaatgatgcactgcaccatagggtcagatttagccaatcacttcagcccctccaccagtttgggcaagtcagctgggttcttggcctccacagccactctgacgacgggctgacgctgaccttcatcacacgcatgttatgtgagtgttcaaaggtggtgatagtccctgtcttcaccaggaactggtctacaccaaccagccccacaatgttcccacagggcacatcctcaattggctccacatgccggcccatcatcgggatggttctttggatgggcttcaggtgcaggtcctccttcttcccaggcgtatagttggggcccatgatgcggaccttgagtcctgtcgacactaccccggagaacacactatcaaaggcatagaagcggcctttgttggaggttggcaccatcttagaaatctacatcataaggggacccttaggatcgcagcttttaatgcccatggccgcctcatcatcaggtggcccctcgtagagcagctcacagcggtatttctgggccgtgacaggagaagggagctggatggttaccatctgcagcagggcatcccctgcgggcagccagcggagcatttaactgaccttcctgcaaatcatgagttttttaaagctattgctgaatcaatagcttcttctattgtttgtttgattttgaatctaatgatgcttgggcataataccaagcatgtcaagaaaacagttgatgggttcgaggcccaaagaacagggctggtaacatggctccatgagttaaaaaaaaaaaaatgtcaaaacagccaggcaatgggaagcattccagtattcccaccattggtgagttggagatggtggaatccctagggcttgcagaccgacctgtctgggttcagctaaagaccctgtctcaaataacatggatgggctggagagatggctgggtgagtaagagcacttgctgcttgcattgcagaggaccagagtttggctaccagcacccacgacggatagctcacagctaattgtgttgtgtgacactattcctggagagacttgaacacacatttactcacccctaaataggaaactagcaacaggtcaaagtaaggataccaccaaagtccaacttggtacaccaattagttttattggggttgcttacaggaataagggtaaagagtaatttacaggagtgggtaaagaggtgacccaaagacccaaagaggtgttacatcaacaaaggctgccacagcagaggtgacagctcaggaaagctggagatcactgcagaacttgcaggcagctccacagatcagagagtatattttccatgcagctcagttggtctgagtgtcctctcatccatccttactgcatagtatgagtgtgggtagacagaagcctggtgaatctggtcagtttcaggaactccctgaagctttcaagttgtttacttcccaggttttaacaagtttgcctcctgaatgaaatgctttgcctcttagtagagcatcctgaattttaatgagcttccctccaaatggaaagtgctaagaaaaattgctatacaacaggctgcaactaccgcttcatgggatctgaacgcctcttctggactccgtggggacccacatgcaagtgcaaataaagagggacacatacatacacagaaataaaaataaatttaaaaatatatgatggaggatagctgaagacaccaaagtcagcgcgagcacacacacacacacacacacacacacacacagagagagagaagagagagagagagagagagagagagagagagagagatgggctgctgctgaatagcaccagggcaggtgtgcccagagagagcctcagctgagtagtcagccagatctgactggaatccagggttttctgctgagaatggcctagcttggaaaatttcttaacctgggcacatttcttaatctgaggcaataatatcacctttcaaaatggtcagaatcaagtataatgtaatcaaaatgcatggcataaagtaaaagtatagaaattgaaccccaagtgtattgtccccttgactgagtgagtaaatacagaggaggactgttttgctttttgttgggggaacatgaggggcattcattttttatcttataagaatggggcgaggtagatgacttggtcagtaaaatgcttaccttgcagctaggagaacctgagtttcagatccccaaactcacactaaagcctgagcatagcacatttgcaatcccagccctgagaagacagagataggaagaaacctggggctcccctagcctactttgagagtttcaggcaaatgagaggaaccctgcccccatctcacaaagaaaatgaaagggggacagtgttcctgaggaatgacaatggagattttcctctggcctctgttcatgtgcatacatgtgcattcatgccagtgacacacataagcaagcacacatacatacacaaacattcaaaaaagaaaaatctagaaaggatctataaagggcttaagtaagagacgggtgacatgaataacagacattacaaacttagcattatgtctccctaaatccctcactgacattctaacccctaatgtgatagtatcaggagttggaaccaccggggaaaactattttatgaggatggggcccttgtgaatgaggttatgctctgagaagcagagaccagacagagaaagtgtgggcactcactctttctttctgctgtttcctgaagaggcaggtcactatctccctgtctctctatctctgtctctgtctcctatctttccttcccttactccctacctttccccaataaactttccatgtaaaaagaaagtgtgggctctcttttcaccatgtgagaatacagaaagtcagctacatgcattctagagaaagccccaccagaactttatactggacttctaccttccagaagtgtgggatataaatgttaattcttcaagccacccagtctgtgatacagtgttatggcagccctcaccaaggtccactggtactcatccctcccctaccactgtcatcatgctgtgccaaggaagggaacagttagggctagagtgggaagatccagtgtgttaaagagagtctgagaacttatgcccagtcggtgatgttttagggcccaaggttagggcccaggaaataaatgaaagcagaagagaagggggagagtaagaaagacagggaaagggaaagagggatagagagaggggcagggggagggagaggcagaaaaggagggggagatggaggagaatcattttctatttctctgtggttacttagggacacaaagatgaaaaatgtttgggtgtaagaatcactggctaggcttttaatccctttaatcccagctcttgggaggctgaagcaggctgatctctgtgagttcaaggccaggatccaaaactacacagagaaaccctgtctcaaaaaaccaaacaaacaaacaaaaaataaataaaaatcactggctagccagtagaatttgctgaaagaggcagaggcagcctgggctgcacatttgaaaaaaacttaccgatctcccaggaaccgctattaaaaatgtcaatgaagagatctcatcaatgggtatgagggctaagaattaagacatcactatacagagtaagggatatagtctaataaagcttgatttccacagataaaatccagttgccatgagacacacatactcagatgtggaaagtctttgcaggaaaagtttgaggccctgttggagcattaagagccaggagctgtggggttaatatcaacacacctttttgtgcatccgcagatggaagagtagtcacaggaatgattttcattataaatgcttattattgatcccagaaggaaaccagccaagcaagagcagagaacagtaagtgcttttccttcaccagaactaaatgtcaaaatctaggtccaaatagtggtaacgatcctttctgtgtgggcttagttgccactaacctcaagcaaactatttatatatatatatgatatgtgacaattgaaatagcatagatgatatatggagagcatacaaaaaaagttgggaaatttagagtttagtctataactgatggtcaaatagtgcagccagctgtgaattatactgttttctgatgggtggtagcaagaatacagaatccttagtggctcttccaagaacaagctgagtgaccttgagcaagtcctctaaacttgttgaacctcactctcctagtctgtaaggggaagaggcccatgaggtctgtttcaccctgagagttctaggtagaaggtgtccagtctcctgaagaactactgaaaacacattcccaccaacatgccaagggagttccatctccagggcttacaagaatccaaatgttgcctgagaccttctgtgatcaagaagctctgaaaagcctggtcaggcattctgtagtcatttgctgatgcagatttggatgcatctatcttaagcacgcccagatgtctgtaccactcggttgtgtggttaaaagttagtattagacctaaggaaatgcaagaaggaccctttctagtgctagaaccacaatgaagaatggccaatacagcagcttcacggagaatgtgacacactgtggctagcatcttgctgatggcacttcacattgagtttaataccccatgtttgtgcatgctctcatcaactggctgagcatgtgcgagcgcgcgcgtacatgcacgcgcatacacacacacacacacacacacacacacacacacacacacacaccacacttatatgttactaatgaggaatctacttggaaaacacaagtacacaagcaattccaaaataactttccacggtttcacacagtttaaggcagtaaatgacacgtatttagtagattgaaatgtattcattatcttccttcagcaaagtgaaccatcaattctacatgattagtgctctgtggcttctccagtgaaaggagaacatgatggatgaatagaaaggaagcgtgatctggaggatgctcacaccaggaaggggaattcatacaaacaaaggcactgaggtgggaaacctcagagcaaccaggataaaagcagctgaatcttgcaatttttctcacaggggtcaaccacctacaggtccctaatcactccatctctagctccctacagttaatctaatctcatcacaccaattactataaatacctccttggcccaaagtatatgtttctttcaccaggaatactcagaagtcatttcatgacaggactagctgctagacatcagtttggaggtcttaaggaccaacctgttcactgacatgggggaagaaatgaccttcccatttctgttcacatgcaaaaagaatagagagtctcaatcctcctcactatccacttaccctgagatgaattctcttcctttggcttatccaatcatttccatccaaacaaaagcaaggaaatgtgtcaagagcacaagaagcaaaaggtcaaagcattggaaatcccagtgggagacggtgaacagaaatacagacacatttgtatggagccgtatatcactcctctgctggccatattattaatattattagccttagtcatacatggtaccatgtccccataatgaactttctttgaaaatcatcaggactaaaagggtaaatagcttcagcctcgggtcatgatgagaaataaactcaggaccaaggccaaccagagacagattttaaaagccaatgcactcatgagttgcataaggacattttaatcagagatgcacagtgaccccagaagaccatagattttaaagtcctaatgcccagtgatgctacagtactgaaaattagctcacacctcacattttcagtgatgctggtgtagccaaacttgcattgctgcagtcacatagtaggacagcatgcaaatattcacagtacgatacacttgatattgacaataactatgttacaggcttgtgaatttgctatattaagcctttatggttgttttagagtgtaatcaataattctgttgtattttaaaagtttactatgaaactctaagctgaggtaaccctcttgtgtcttcagtggatcaagaggccaagttgaataattggccttggacatctaggcttgggtgctggtgctctgtgatgttcaagcaacactaaactcatgggatggcatgttagcccacagtatctctgccgtgaagctgtgcacaaaacaaaagagaaaatgttttctaacacactcagcaatgacctcgatcacaaccaagttagcctaaatcattatttcataccatttccaggggtcagagtactttaaaaccttgttctaaaagatctttttataaataaattactttcctttttcctttcaaggtttctgcttcaattagcttcggaaacactgtgggtctattgtttgcaagtttgaagttgggcccttcaccttccacattccacccttcgacaagctcctctcaactggcagtttctatttatatttcaacatattagtattacaaatttaaataaaattctccacttgtatcattaattagcatttggcaatgggcctgattaaatgcccttggcaacaaaatgatttaaatatcgaaaaggttatttttatcatgtattaaaaatgtctgttaggcaaccaacttaccctcctctgctcaggggccactgtggttcttaatactcctctccaggttgtattgggtaactgccagtcaatatggccagctctgccaaagactgaggaaagcttcttacaatgagggcagttcatttttttagaggcactcatatttacatatctatccacccctattccctcaccctcccatcctcccacgtcccctaccaagctcccccaacccatcccccaactcctcctcagggatagtgaggccctccacggggcaccttcaaagtccatcatatcatttgggggagggcctaggctctccttgctgtatctggactgcaatagtatccctccatagggaatgggctcccaaagtccatttgtgcaatagggataaacactggctccactgttagaggtcccatagactgtcttggccccctagctggcacccacattggttgggtccaatgctgtttcctcatctttatatctagggtctccatgctctcagtaggtcaggtcaacagtttctgcaggtttctccagcatcatcttggttcctttactcatccctactaatgagggcagtttagatgattctcttcttcctcttcttcttcctcttcttcatcatcatcatcatcatcatcatcatcatcatcatcttcgtctttatctccttttagtttaaataaataaaataatcctctactaatccaagctaagctatcacaaaataagattttcattcagttattgatattttacagaactataaacaaatatctatttagccagatttcatggggctcctctgtgaaagggaagggctgaatctgaactgtgccagatgtagaaaatccctgctgtgtaattctgaactttcattcataggacttttgggtacacacctggctttctagcaagtggcctagtgcctagaaactgtaaagacttgccaagcatgggttgaagaagggggtgatgaatacccatccactctatactgaagagagggccagcatacaataagggagccagacaagggcctctgattggagagcttgatgctcttcagatgacctgagttcagttccagacacccatgctgggctgcttacaaccacctatatctgcaactctagggctcgctcagttgttccgacctctatggcacccacacatacatggcttacattcacacagacacatacacataaataaaattaaatcttaaaaaactaagcaagaaagatggcaatccttgtttgcaattctaattgaatatgtagttatgttatcaaaaataaataatatggaggggaaatattgggagaaaacagtgcaaaaacatttagaaaatcatatttttctcatttatgaggtgttctgggtaaatgaaatataggaaaggagtagaggttgaagaaaaaagaaaataaaagaaatgtgttcataattaacataaggaaatattatacttaaataattcttaccactgagtcatctatcagatgtttaagagcattattgcatgaaattaataaaaaaaatctatttactgtgattttgccagacttagtgttttgtgttttcctgacacatcaggggagttagaaaattgtcccatgatgactaatggtttggtcattagaataaagatttcaatgttaaaaatggaaagttttatttaataaagatttttgaatgtcttcttgacatagaagtaaatatttgtggagcaaagaaattcaagctaaagaaaaatagggagttggatgttcatgtgtctgggaaaccctcaaaaaagagaagctgggcctagtggagcgcacctttaatcccattactcaggaggcagaagtaggcagatctctgtgagtttgaggctggcctggtctacagagccagtttcaggacatccagggttacacagagaaaccctgtctcaaaaaattgagaaaaaggaagggaggaaaagagggagggaggcaggaagggaaactggaaacctctcagacaagatgagaaactacacaggtgatgcatgagcctctagctctagagagagggtaattagaaagcacccaccatctttgatcataataagcattttacccaattttttggcaaaaaagagaaaacccacgtcttgaaagaaatcagagcagacctaaaatatactgtttataaaaacatccattagtcaaacactaacaaacagaagatggctagttttcaaatacaactcaccagtgaaaaaggtcggctttaggacaagttacataggattgaaattgtcctctgaacatcaatgttagctttcctatgctccccggaacattccgttgccatcattttagagaatacacattgctttgactgggtacagagtcttaattttcttctttcctttccttggtgctactaaaaagcaaacagccaaggtaaggattgccaccctttgccccggtgggttaagggcaaacatcagtcaggactaggtgactcagtcaatgaagtttgtgctgagcaagcacgaggacctgagtttgtatccccaagacccacagggaaggctaactggggcaggcagagggaagaggaactcagtggccaacccgtctagccaattagtgagctttgggttcactaagagaacctgcctccaaacagcaaggtgaaagtaataggggaagacacctctggctccacacatatacacatacaactcactcacacatacaacacacacacacacacacacacacacacacacacaataaaataaagtcctttttaagaaaagaaaagcatggagagatggctcagccattaaaagttcttgcaactcttccagggaacaggagtttagttcccagcacccagcccaaatggcttataaaagcctgtatctctagctccagggtatccaacatcctcttctagcctctgcaggcacccctaacacttgtatactcatacacagatacacacatttgcataagtaacaaaataatacaaattaattaaagtgacaagcaagtggatggatttgaatacacttacactgtaggagaagggaaattgtggattaagaaaaaaaccaatcttcatggggtcccctgtgtggcagatgttgtactaaggatattacatgtattatctctcttaatccatacatccctgaaaattggtatatttataagaatattatttctatttcagagataaaagaattgaaaatcaagaggatttaccagttttcacaaatctgtcaattagtgcaagtaggagctgaacataggtcagttggagcaaaagcagctatgatcctcctcctagcccatgcaatatccgtgatgagaggggattccagtaccagacatgtactcattgtgggcttcaaatatatacccatgtttatgtgacctttctataagcactaccaacctgtaccctggtaataactgtcacacctgagggtcatgacccttgtgggtacttttcaactaactcttgtgaagtgaatattgcctctattatgagtactggtcttaagtcagtcttatgatctttactaccacaaccaccatcaggaccaaattgtatctttttcttctctgcaggttctactgcaatgccttgcagataactgaactgaaaagtaatgacctgaactgaattgtcaggagttacaaaactaggtagctgagtcctcattgtctttcacacaaatagttactgagcctcaagtttgtgcttggtggtattatgattacatcctagtgacattattgtgttatttcatgtttttccaatatctttctattttaggacttgggtgaggttgtttttgtttttgttattattgacaagacagagtcacactcagtagcacaggctggcctgcagctcatcatgtaactcaggctggctttgaactcagtattcctcctgtcttgccttcccaagtgttgagattatagtggtagccactataactggatcagtatcttttaaatagaaaataaaatcctatttcttgttacatcatagtagatacctataaacatagacacaatagaattttataccttgaaacattgctatttggagagaaaagtagtaaccacaaacataggtagtccttccttctagtggtgacttcctcattagggaggtggaaaaagagcattttatcccagaatcctttcaatcatgaaggttcgattctcgaagtggggaggccttgctagtggggagaagagattggggatctgaaacttcaagtcatcttgtgatttcactccctttcctgctcaggactcctcctgctttaggtaaaggttctgagaaccactgccccgagtcatttaatctacagattcctgatcctgtccttcttctccatgcagctattgccaagtggccattctggtagttaagatatgcagatccttggggatataattaaggagccactgagatgcttccatcaaagcacagctcatcctcggcagccaactgctgtttgtgcgggttaaatgcttaacagtcctttcatgtcccagagtcaatctgtgtttaaaggatggaggtgagtgggcaggacggggcagtttatggtctctgcctcctcgtttattatcacactgatgtttcacgggcactacctcaactgatggaaaccaagggccacatatcaccccagttattgggatgaagggtaaaatacattctttgttcactttttataaaagtatttaaaataatcatggcaataaatctgattttaaaaaaataccccaaaatagaattggcttcctcaagagcaaaattactatgggtttggctccccagagcagttgtgggcatttttccaatgtacagttttcctatgtacaaatattcctttttagacatttcatcagtctatgaatattcttagttctgaggtcagcttatagaaccgtgtcagtctgcaaactctgcctgcagcctgcatacctgctcttgatttcacatggggaatagtgggttatcaccagggtgagttcagctctgttctgctccctgacataaggccataaccctctaaaatacttcagcataaagatggcccaggaaaataccattcattcaaatcatgctttctctctgtcccacctgaacttcaacacaattaaaatgtatgatgtgctcattgtgttcctatagggtcagtgtaagtagtcataaaaagtatggcttaaaggcagactgggtaggatggttcagaggcagaacctgtgcttagcatgcacaaggccctggatttacctctcagcaccaagaaacaaaaggaaacacacacacacacacacacacacacacacacacacacacacacacacactatatagtgacagaggcaggtaaacactcaggcagatggagtagcaaaactgcaagtttcaaagaaaccctgaagaatattttaaataccagaaatcaggccgcaagcatcacacaaggacaaaaacagcaagtagcttttttctttaaaaaaaaaaaaaaatccatcgagaagacatgacaagttttgacattgagtaaaaaatgacataaatgtgacaacctcagacccttaccacagaaaacttgaagcagaaccctgtgccagagagacagatggaatgcatcattccaccccagcatcctaaaatacatggggcttttgcacaccatccctctgaaccatgagagtaacatcatttaacacagccattaaatgcaagagccataacatgcataacaaccatgtgtaggtgatagcagcctgccagaaaaacacccaggacatctcagactctgctggcagactgaacaaagacagagctgtacaagcctcccacacagagctgaaaaactgagtgatccacctaaagcaattgaggaaagatgacaagcgccaacttaacatcgttcagtaagctcacggtcaggaataactcagctgagaatggcaatctctgtgcccacagattgagcataggcaaaaagtacagatggaggggtacagaagacaatgggggaggcctaagtgatcggtttcagaacaagacatgcctcttctaggggtctccaaaatagagcatttttgctgaaatgaaatgttatctgtgaacaagccatcccagcccaagacagcatgaactaacaaagcctgaaggccagtgaggccacctcctcaccctgctttattatctgtggccactgttgctatgacaacttttctgaggctttattggggacccagaaaatccccacaggcagcggttttgtctataggacatgaaggagctggtcagtttggtggaggttaaatggtcaggtcatctcacaagcttactttggaatcctccatccctagttttaaaaaattgtctgaaatattcacttaaattgtcccaaaagtacacagacacttctttattaaccttaatataataattccacagaaccccaaagactgacctttctgattcctagtctcgaaatgtaactttctcctgtcttaacatggacatcccaagtggaaagaggatttggttttttgggttttgtttgtttttttggttattgtggatgtttcaactacttggtattcaaccttatgagaagggggcctttggagcagaaaaccaaataaaacacagagatcagaaagtccctgtggcattatcacttcatggtcaaagacaaacagtcaaagtagaacagggagtgaagaatttctccttgttgccccattctgtcaagagccgtgccgactccccttagtgattatttattttccactttccctacgtggttctcataataattactaactttgtgagatgtcagaacatggccacttaagcaaagcaaagtgcctttcaacatttatgaagtgctgattctctataaatacaggagagcgctaatcaccggagtacccgttggcacggcagatcaatactgaagatgaacactcctctttcattgaaattcagaaggcaaaaaaatccatccatttgttatctttctgataaactagcatttctgtgacttgccgaataaaatttaagatcagagctatctcagagactcgaaaatatctaagaaaagaatcgtgggtcaacctggtctatgtcctctccttgtatagctctatatatagatatatgtgcacgaacacctttggagagagatagtggtagcaacactgtcactcaccttgtgatcgcttataaaataaaatcatccattgtgagtagcctgtagcattaaatagctgcgatgcgcatcacaaaatgcctggaagcgcagataagcttcaatggtgatctggtgaatattaagtgtaaattgtgtttctgctttaggggggacacttcctttccgggaagccagcggcacttataggagaccacaattcaggggggatgcttagtctggatccaaagcttctagaaggaccgaagatggatggtgaagctcatttgtccattcaaatcttgtcaagcttgcctatatccctagcaaaggccagatatctgcaagccacaaactaagggccacgccagtggaggttctgcctgtctttcaaacagattgaacaccagttccattttagcttctcacagctccaaagtggctcactggccctcctctcatcagatttggatatcttaatggatcaaggctctaactactgtccagaaggctctgattatacgtgtgtgatgtaggtctctataatataccatgtgatggctacttctaatggccaataccacacaatctagaacctgctgggaatagtctccctgaggaattgtctggattagggaggcctgtgcccacgcctgtcagaggttttctcaaatgggttcatggaggtgggaagacctatcctgaaataggcactgattcatgggctgggcccagggctgaaagaaaaggggacctcatgctgaacactggaatgcacacataaattcattgctctccattcttattgtggatgtaatgtgcatagcttcttcaagttaccactaccttcacttctcaatggtgaggggctgtggcctgaccatatgggaaaaagaaacacttttccctcaaattgtttgtgtcagagtattttatcatagtaaccgaaacaaagcctgggtaaactagatgggggggggcacactgattcaaactgtccatcctggagtcctctgtacctcaatttgcttgactgtaaaatggaggtcagtgtactggctttatgcatagcctgggaggatgaagtaaactgacagctctgagcacctcagcaacacctaaaatgaacagaccttgataacagctcaggttgaaccaaacacctgctaatgtccaatacttcaggagtttaggggcctctgattttacatgacttacatagtctgttcaaaaggacattcatccttccatattcccctccttaagaaaagtccaacctgccatacaataagctattaattgcataagtctttccaagatacttatcataattaatttcttaatccatctggacaaatattttttagagattgttaactccaacttgaaaaggaaatgctggagtctggaggcgcagatcagttggaaagtagcatatacaatgccctgagctcaactctcagcagcacatcaagctagacctagtgggtggcacatgcctctaagcactcaggaggtggaggctgtaggattagaagttcaaggccatctctagctacatactgagtttgaaactagactcagatacatggtgccctgtctgaaagaaaaagaaatggagaggaaagacaaagagggagagagggagagagccagaaagaaaagatgaaacaccaaccttccaatgtataacctaattagaaataataacaatagtaaatattgaccttttatggagtattcactgcctgctaggcatgttgttaagcacctgaaatcgctatttcatttaatctttagaaacatcacaaaaaaagtggttgctagcccttccagctcatagacaagagagggaaggactgactcacctaagatcatgcacgtagacatgtaggagaataacacttgcagctgtgacaaacacaccctgaatcttaacggctcgacaacagctttgctgcttgtgtgtcagcctgctgcaggagtgggacgatgacgaggctatgctacataatacatgagagggccaaagttccttcagtcttcttagacttcttccaagtcttcctccaactcctctcccttcatctgactgggggttcgggggtgggggagcaaggatctcacatgtgtttctattccaggcgccatggtagttaagactgtttctgggttcattccaagggccctatcatgtcatgtaccactgacatctcaaggatgggatggaatggagccatccttgacactctcagcgtcaagattcacggccaggaaacagcagagccgggacctgaacacccaggctcacgagaccttcgtctctcctactacactattcctatcttgcattagccttgcagatttccccgaagcaccctgccagctgccttctcaacagcttgttaagactctctcactccagctaaagttgtacttgtgaatttttttgaaaagtttttatatatacctagttgtatttaactatcttgacatggtttgctgatctccccaagaaaagttaaaagcactgtatgactcacactgagctacctccatcttcatctgctttccagcccataaatatggatcatgtctacccaagatgatgtctcttcaaagtctatatcagaaacagtactgctctatttaatttaaatttgtgactaccaagattgacttatgcttaatcatttttatgtatctattaattgcattcttatttttcaactaaggaaataagaggagaggtggatggctcatgtcatctgtaatgtgataaacatgagaaaaatgttaaaaatgatattcaaagtaatgtggtgccatagtcataaataattgataaaagagatatgcaaaattattctaaatctatgaaggtctatggaatgattaagcattaaaacagtcttggtcataaataaagacacacatagaagctaggcaaacactcaaggatgatgtaagtcttgaatctgactggttaattctgaatcttgggcaacacactgccaaaaatccattcagtaaagccatcatcaattcctaaccataaaggcttcacgctcagtgataaagatgaaaagcttattggcatcattattcccaatttccaaatattttcagctttctacttgcctaacaaaggtgagttcagttccctaccttccttgaaattagaatagtcacatatgacttgctggggcttatggaacatgagagaatgtaactattgttatgctcaggcagatttaagagcaagcatatgatatgctccaatctcattttcctttgataatggattttaaaaaatggctataaattctctgaggcttctcccatcaagaactagaaggtgttccctccccttttctgagctagcccacaggaagctttgacacctgactcacttggaacaatgttggcatgtactccaggccaggttagattccattaaagatgaaacagcagatgttgggggagagcctgctctcccagggagccctcatcacatgagtgaggcaaactagcgccaaacaattagctgccaacccatcaagtcactgaatatatgtgagtgctcagacacagcagttgcccagctaaatgcaagccaagctacaaaaatagttaataaatgaatggttattttcattgctattagaatagaaacttgtttgttacacaacaacagttaactgagatgtcagcctagtcaactaactatatatagagtgtatgtggcatccggtagcctgggtctcctagcccatgataactgtagtaagagcatggagaaataacccattgttaattaagacactgagagttatttttcatttcttctctctgtctctctgcctctgtctcttcctctgtgtgtgtgtacagacactgccagaaatcaaccttgctttttggagacagagactctctctggcccgaaacttcccaggctactcaggctggcactgagccccaagaatctcccagtctcttcttcctgagtacagacaaaccattgcgcctgttgttttacatgggtcctgggacttgaactcagctcctcatgcttacatgataggcagtttactgtctgagataacttctttttactacataaccttgtccttcctgacaaattcagaacttggcaccaagaagaatgctactgtaacaacagaaaactgaattgaaggttacataatggatagacaggaaattgctttcagaaacttcaatgttggcaacatttatttcactactacacagtatttggcaaaatgttcgcctgtgctatatactttgatgagaatgtcccccaatgctcatgtgttggaatcctggcccctgttggggtgtgctgctggaaaggtggaatccttagtgggcaaggcattgtggaaggtctttagctcattagggagtggccttgaatgtttctttgcaccttttggcataccataccagcagtggggtgattggttttattctgctgcacattctccaccatggtgtggcccaaataatagggccagctgtttgcagaccaaaacccctaaaactaagagtcatttctacactgtttatctctaatatcatatgactgaaagttgactcatggtctgtgaaaactcagaaggcagaaaacatgaaatagtgtgctattctaaggaaatgttgggaagatgacaaggaagtcctttagccaccctacaaaggacaatcagcatgattgaaacatagaaacagtgcttatgacatggctggctattaccaaaagcatattaccacacagcctatgagccattcctagcactaaagtgggagagggcgccacaccactgctgtgccatggcctgtggaggatgtacaccgccaatgtgagcataggaaatgctggaataagagaaggcactgggctttggaacggtaggaaatgggaccagatgccaaacattcagacttctcgccaatgaaggagatgctggtcgccttggtcctccagaaaaggagcttcctactggaagcctaagaagagcaggtttggagtttccttctcctctcataattcttttctttttaaggttttgcaatcttccaaaccttttgtgaaaattttgcaaaaccattgtgaaattccctctgcggttcctcactctggctcttgttttgtttaattagcaaagcaatgatcttcatccatacttggacttgaatggtccccccttcttatcttgccctgtcattctgcacgtgcaccatgccacccccagtgttcccttttgcactatcataacacatatattctcttattcttccacattcccacactcctccttaagaccatattttctttttttctattttttatttaaattaaaaacaagcttgttttacatgttaatccagttccctctccctcccctcctcccctgcccctcactagccccctatgtcatttcctttctgctccccagggaggatgaagccttccatggggggagtcttcaaagtctgtcacatcatttggagcagggcctaggccctccccatggtctcatggtctcctttctgatatcattaactatatacacactcattccaggggcataaatgcacatatatggaaattataagctaagaccctcatatgagggaaaatatgccacatttgtctctctgagcttgggttacctcccttaatattttatttatcagttccatacattttcctgaaattttcataacatcatttttctttatggctgaataaagtcccttcatgtctatgttccacatttttatcatccaatcatctgtttatagacatctaggatgattggatttccttcttctttacaatagagcagtaataaccacagatgtgtatctctgtggtaggatgaagtccttcggtccatgcccaggagtgacatagctgggtcatatggttacagcttttgtttgttgagaaatttccactgatttccatagtgactgctgttgtttgtatgcccccggcagtgaagtgttcctcctccccacatcagctgggaagtctgtgtgtgtgtgtgtgtgtgtgtgtgtgtgtgtgtgtgtgtgtgtgtgtgtgtgtttcatacaggcctctcgaggttataatccaatattctttatataagctaaaggatctaattatcttcctaccatcaaaatgggctctgaattcaacttcaaagacaaataaggtggagctgtgaactctggccagtttttcctgaaattgtgtcttaggttctgtttcttgcccagggtaaatgacactgatgaccatttcatctctgtgaagtagttgttggtcatgaactatatggcccacagttagctcctgagctgttcctgatggtgaccagagacaaaaaggctccactctgaatcttcctattccatgtcagtggcaactcttcaggaaacacagctcagaaagaaaaagagtcctgctacaattctctttatcaatatgcaagatgggtgcaatcaagcacacgcttaggggattatgtaactttgacttttagcattacttttattgggatttgagtacattttggggggaaacatgatttttgcaagacagcaggacagagaaaaactagttttaaaatgttttttatactgattcttcaagctttcccgatgtttttatagacctgacctccactcaacctttcttcctcctgtaactgcatccaccatacttaaagtgtgcaaaagaaggcttagatatcagcaggcactgcaggtgggggactgagatttgagtgcgattgataacaggcgtcagataaatctcaaccaagggaatgagtctgccccttcacaagctgcaggctcatacatgcccacatctgggattgatagatgtaagctgctgcttcatacacaccaaggtgacccctttcactcagcctgccatggcagtgattcctgaataaatgttcccagcagagaaagaagtgcaagaagtgattctagcaagccagactcattgtcgagccagcatctctgagctcgggtgactgcaccagagcccaggacttcatcagttacacttcaaacagcccaggacttcatcagtggaatttcatacaagcacggatttccccacagaagctctgctgattctcgtggaaaccagcatcccaatactaaagtcaggcaggcaactaataaagtaactactcctaaccccaaaaggcattaatcttggctcaagaaagggaaggggtcaagagtaaaacaacagggatggggatatagctcattaagtaaagtacctgctacagcatgaataactgattgccttccccagtacccatgtaaaatgccaggtgtagtgatgcagtacactgtaatcccagtgcctgggaggcataaataggtgcattcctggagttcactacctctttgcttaccctaatctgcagatcccagggaaagaccctatctcaaaaaaaaaaaaaagtaaaataatgatgatgaggctatcgcacgcatacacacacacacacacacacacacacacacacacacacacacacacacggtataaagcagagatgcccaagagaggacaagagtaacactccagaagaagtaagagcagaatgggcaatgctaaactatcgatcatttaactggagcagagttaaattagtgaaaatttgtggtgtttagaattgaaaagcttctgggtttttcccccaacaaaaacagacactcacagagaatcctaataatatgctttcttacagagtgtgtcctttgggttgaatcattctttttagtaagatctgtcagctgagagatgtggggttttctgatgctgcataattatcaacctgtgaatatatgattctgttatttatcatagcctttagaaatgtaaagctgaaataattttttggcactttgattcattccataggtatccttgaaatgtaaatatacagcccaatctatgccaccacctccaaactcaataatatagtaattccaagccatccacctttggagactctatgaacaaaagatattcccattatgactcctaaaacaaaactgtagctgacagtcaaaaggcctggaaggccataaaagggggagatggggtgctttagttcctaactgatgcagctactggcagttgacagagcttttaagaggtgggtcttgatagaagaagttaagccactggggatacatcattgaagaagtactgggaccccagcctccagagtacacagcaattccagtccccattttcttaaggactgagcaggcagtttgaatctcattcctttgagttcttcaagcactggtacttgcagcaagctaaccctagatctaaacagtatcgatgatttgagatgcaggcaagggtgttactacaccaggaagctcaagtcagtctgtctcagcaggttttcaaggatgcctgatgacgtggagttctattaagagcctagccctgggagcaaatcttctatgtgtatatcgcgtaggaatgtttatcaaaaccaaaatagatttcaacctatccttatgagaaaggtaatcactatttgccttctggatccagagaagggggtggagtaagctagtcacctcccctgaaaactcaggagctggcagagggctggaaaatgggaggagggaaggcagtaagataattagaaaatcaacacaaaactatactggtttgttagctgaggggctgtccttagcatctagatgttttaaggagattccaaattggcagcttctcatatgagagtgctgcaggaaagatgagaaactactaggccttttatttgcttacagtagaaacaattgaagagaggctaaggagggattcaataaagttcttgctgcacaagaacaaggacatgagttcaaatccccatcacctacataaaaagctggattaggctgacaaagaaggctccatagtgtttgctggccagccagcctaacctaatcaagcaagcccaggtcccagtaaaataccttgcctcaaaacagaggttggagaaacatttacttctggcttccacattcgtgtgcatacacacacacacacacacacacacacacacacacacacgcacgcatgcatgcgtgcgtgtgtgtgtgtgtgcgcgtgcacgcatgcatgcgtgcacgcgcacacacacacacacagagagagagagagagagagagagacagagagacagagagagaaagagggagagagagatcctaagggtaaaaaaacattcagtgtctctctctttctttctttctttctttctttctttctttctctctctcttctctctctctctctctctctctctcactgtgtgtgtgtgtgtgtgcgtgcatgcatgcatgcgtgcatgtgtgtgtgtgtgtgtgtgtgtgtgtgtgtgtgtgtgtgtgtgtgtaagagaagtcacacctgataatactgaatagattggagtaaaaataaagaaaatatctgggcatggtaatgcatgtctttaatccaagtattcaggatgcagaggcaggtagatctctacgagttcaaagtcagtctggtctacattgtcaattccaggctagtcagagctacaaagtataaaaacaaacaaagaagacaactccagataaacagtctatcttgcatttcataaagcatatgccttttaccgctggagggatttgaggtcaaggttatatgaaagtgtgaactatccctgcctctcctcaggatcacagctagaacatagaaggcttagcagagggacagcagagggaatgcttacagtattgctgtattatactacagcatgaattcttcactaccatctaagagggaggccttgatctgagtgcttagactccctaatggtttcaaagggcaaaaggaaattatttattttatgatattccagctgtcctataattgactacaacaatacatcagtttggacctgattataattctacctatcacatctgtatctagttgcataggaaggccaggtacacaatggaagagacctaagaccctaagtcaccacacacagggctattgtacgctaagcccctgaagtcttgcacataatttttgtataggtttgtggaattatcctggaaagaattacttggcctcttacccaaagctctaaaaaccactgctggcactaaaactgtggcactggacatttgtttggttaatcagctcttcaaatgcaaattctccttggaaagttagggtattttcacacctttctcagagtctcagtgagcctgctcagtgcctgctgagagggaaaggcttccactggcagcctcactctagctttatttccatggccctgggacaggtgaaaaagacactcacccttgtcagcagatgctggcaggggtcgtctgtggcccatctcagcagtgtgagacttcctcctcacagcagcctttctcaggtttcctttcagccctgagaagagagggtgccggaaaagccagggacagatcatgagctggagcacccaactgctgagttcaactagaacattccaaatagagcttgaaaaggaagtttgttttcatcaaattcctccctatgaaatgtgatgtttgacagtgactatagaaaaaaaattaactctccatcattttagatgattttgaccttttgatgtagattgttcaattgacaactttatctgtggatttataacgcaatattgaatactgcaattttactgaatccaatccattaaaacgtgtctcttttttcaaatatacattagcataaatttgcaaatagttctctattgggttaaactattttttactgtgaggttgtatatctacatcccaatttataggaatttttatttcataaaattatgacccttataagctaaataaaaaaaatctgacaattcaaatttttcaacattttcattattcataaaaatcccaaagcctagagctaatacaataatatgaattaacttatcagcttaatttccacttataggagtttttaaaggggctgcaaagatggctaagtgggtaagaacactcactgcacaagcataaggagctgatttcacatccccaacacccatataaaagtctgggtgtgcttgcacacacacacacacacacacacacacacacacacacacatgaaaccctaacactgtaggagggtggtgagaaaagaatcactgggacttgctggctgccagcctagctccaggctcagcaagtgaccctgtctagagggaataaggcaaaaggcaataacacatgacacgtgatgtcctcatctgatctctacacacacatagatggtgttagttgttatgccccaattaactaattaaagaaagacatgggcaataagaaaggataggtgccagagctatcctgagtctggaacactgtgggaacgttgctgtcttagtctgttttctgctgctgaaactggaaaagctatacagagctaaagttatttttcatagttctagaggctgtgagtttaagataaagacaccagtctctggtgtgggtctctgctgcatcctcgcatggcagaaggtagaaagatgaaagttatcaaaatcattccagaaagtcctttccatgacagctttagtccatacaggagcccttctgacccaagcccccatcaagctctcattcccatcactgtggcagtgaggtattaaggtcccaacacaggaatttagggtgacatattaaatctgagtctcatgaggcagctctctgggtaaagagcctggtcaccaaacctgatgacctgagacccacatggggagaaggagagaactgactcccacaagttgtcctctgacttccacatgtgcactgtggcacagacatgcttgccatagacacatacatgcctgcacatgaataaataaataaataacatttttaattaaaaatgaagaggttcacataattagaacattcttgcagagcaatgaaagatgtagagatgtgggtaccaacagaagatgggaggtcccccaaacacattctgattcttctttcagggttactaatgacctgtcctgcctgccagtatctgcctgtgaaaataactgtacaagagtgttaaaaactcccgttgcaaaaacttggctggttttatgtaaaattaacagttgtttattgtcttaaatgtttgtttatacagaatttttcaagttttttgactttatttataggaattctgccactctgaaaacactttattatctgcaaataaagagataactgtcttaaaatacgcatcccagtttgtctattaaacaaatcctagagaaaccactaggctcaccctcacagttaatggaggcccagtgttctggccacatggcgtagaagttcccactgtatgccttcctgcgtgcattccaaatactgcatcaactgtccctctactccttcagcaaatattaatttagaatgagctaggtcttccaattctatctcattcaactggctgatacacacatcagtcaaagagtatgttggattgttaaatatcaaggccatatttatgttaaatgggaaatgtgtctttaaatttctgaaaacggggcagaaagatgactcagcagttaatagcacttattgttcttgcaaagtacataaatgttcagttcctagcatccacactgggtcattcattcaaccgcttgtaaactccggctacaggtgcaccaacatgcacttttggcctctaagggcacctgcactcacgtgcacatgcccacacatagactcaaacataagcacataattaaaaataatataaatctttaaatttctggaagttctgaagcactttggctctctctctctctctctctctctctctctctctctctctctaatctttggatatgggtctctgcatcttttctaaccatctgaactgtgcccatcagtttgaaaagtgaccagtcaccctgaagttgaaatctctctggaccactcattgcctttggcttaaaacaaagaaagcctcattctgtaactatgtaaaatgatttttctaataaaaacaaaacacctatctatgtcaaaggaatattggaaggatgactagataatgccttccaagttgcttttaaacggtgctgtggaaatagaagacactgtcacaactgtcattttgttacttttttttttaatcgtggagaagctagtattacatttaaaaaaatcagaaaagtcgattttcttaaagcaaccatttggaggcctaaaaaatatctgtgctagatgagcctttttgttctaggttcctatccctgtgtttcccaccaagttcaagcccatgactcctgaattttctgtagccaaggacaatgagaagaaccaagatatgcaacggaaataaataaccagaaggcatcagaggaccaaggtgcagaagcctatcacaagagatatttgacagctcataattcaacctctttgctcttctagcagaagattcggcttaaagaattgaagcagccttccaaacattacacaggcagttagaaaacaagtgccatcatataaccaaatgagtgggaaaggcatgaaaaaagtcaccaacactgttccataatcagcctcatcagttccataacatgcctcacgttcaagttcatgaagaagggggcctaggtcctgggtccccacagcagaggatgacagtgactggatgccttctggcatgagtccaactctgtcccaatccatttctgttactgcaataaaaataccctgacaaaaagcagattgggggaggaaggggtctgttttagctcacaattcattgctacggggaattcacagcatcatagactctgtcacagcatcatgtgacagctggtcacattacagccacagctaatgacagagagagtatgttctctgagctgtgaaagatgtgagcaggacctattcactgtagagttattgagaggatggaaggagactatacagtgtttagcagaatggaatgataatcattgcttttaatgtccctagataagaaaattaaacaagaaagtacaaataaagcatttgtcaaatggcctggcatcataataagagctcaacaaatattgggaaatattattacagcacactctcacacaagcattcatgtaataagtatttgttaaatttatgaaactcttaccagttgcaggaactatgttctctggggcaaggctgtattcatggaactccacttgttcatggtcaaatagaggatgaagacatgcatccaaatcaatgtcctatgccaaaggtgggcaggtggagcctacatgccaactccattggtatttttatgactggcttttatagttttcaatgtttaaaagaaaaaataaaatgagaaagaatatttcatgccgtacacagtgtatatgaaacccaaattttagagtccataattaaatgttattggagcccagccaggcttcttcatttgcatattgcctgtgactgtttcaccccatgacagccaagtggaatggttgtagcaaagaacatatggacagcaaaatctgaagtgtttacgatctggttttttacataatagtctgcaaccctgttctgtttcttggtaaacattataatacagctgtgtcctgcaggctactatagaagttccaggtaaggggtaggagataggtaactgtgccttggaatataggggagacactgccaaggagctaagttataaagaatgaggagagctttatctgatggaaaaggagacccagaatctttacagagcaaagcagggtcaggaaaatagaagatgttcattgctttttcaaagtaaccctggcctaacaggctagcaagatcatcacatatattcctgatcttcaactgtctactaatctctgaggctttatctttaatgccagaacaattatcttctcccagaaaaaaaaaatcacatagaacttttgatccctctgaggttttttaagtttctgatggaaatgagacataatggccttgtttgaatatgttcctttctgtgtctgtgtccagtctcattagcatgtgtcacagaactaatctgtaagtgtgactggttctcactgcaggtcctaaaagcatgcgtggctaccaaggttaaggggcactgaggcatgcactccatcaataaaaaaccagctgaggaaagagtaaacaagacaaggacaggacttagcagaggctcaaaatgacactaggaagcatgagcagatagtgaaaagaggcaacacagatcattagaaggcacacttgaacatgcggggaaagcaaaaggcagatgcctcagtgccatcagtgatggaaccccttagcacagccttggattcacttgttggtagaaggccatgctcatagagttcagaggctgtaataaacttaagatcacttgacaaaactaaaaaacaccaaattcagttgtgggtcacagagacatacatgcaacacatactcacatgcatgctgatgtcttcttctctctaactaggaaggatcagctcggggtcaggtgacttcccaggacagctcaatcctttagctgccacaacaacacagcaatttaccccagttctgccaagtgcccccaaacagcattattcattctcccaggaaaggggccttctccatgaggaggtactatggtgatactcatgacgcttagctaagttagggtttctattgctgtgaagagacaccatggatacagagtcctttataaaggaaaacatttaattagagctggcttacaggttcagaggtttggttcattgtcgtcatgtggaaagcaaagcagcatgaaggcagacatggtgctggagaaggagatgggcaggtagtaggaaaataagtgatactggccctgggttgagcatctgaaacctcaaagcccacccacagtaacctactccagcttcctggataccctctaggcatgtctacaatggacagggaagtaaatggacgattcctcttgatagttcctatggtttgtgtcatttctattttgggggtagtacagttaaacaaatccgactttagcttctaaccatgagttcagaaagactgcacatgggaggaaaatgcaagtcacaaacagcccataatactcagagtattcctacgggctcctgactcagtccctttcatgcttgcctatgctttgctgaagatgaatgccatcatagagttctcctcagtgactctgcagtagatgttagtggacatcctaaaccaggtcttcagagaggcccagacttgccctcccagcagcaggagacaccagagtacttccctgggaggctgcattgcccaggaggacatgcatctcagccacctagcttgtgcttcattagccgtgctgggcatgcctgaactgcattctgaagcaagccaacatcccagcaacagccatattcgaatatcacctactgagtgaccctagaataaaagaaattgtatggtttggatggctgggatcaaaattgaatctgtactgcatatttatagtcctcccaccaatatccacaccataaatcaaactctagctctttgttgaaatgctttcaggtagcaagtaccttcacgttatgctcgtcaccccaaaacagtgtattttcttacatttcaagccaggagcagcaaaccattcaactaaataagggaacactcataatgcaacaaatgttctccacggtgcctaactcctataaaagctgaatgaaaatacatatccttgccctcaatagaaagaacgagcagaggctttgtttttcttttttaaagacagaggggcccacttataacctctctcacaatcacaatcgaaaaatgacctgctctttgtaaagaataaccacatgagctggggtgtagctcggtggtagagcaagcactcaccatgcaggaggcaccagctcccatctccagcaccaaaaagagaagtcaaatgaacaaaaactacaaaggaagccccttcaatcaaaataggacattgttattttcatatttatgcgtgtgtcaacagtattcagaagcttacacaataaataacatcgcctgccctaaggacctttaccatcaaaagtattgataaaacaaggaggaagcctgcagctgcagctgtgaagaaatgggagccagaggtgggaagcctcaggcagttgtgagctgccacaggtttgaggactctgaaaaaaaagctgttgtgatgagcaggataaagacagtggtgtagaagagaaaagaacagcaagcatttgttgccagtgtccccttccaacaaccttgagctgaggctgctgcaagccagtcaggtggtaagtgggtgtggtcccataggtgacactgagaggtgactgtgtgtggtttggagccaagtccttaatcacttatataatcgccaggttcctaggctataacatgggttaacaatagctatacccactcacctagactccctcacctccaaactgattaaatagaaaaatgaagacagtacagtgctgagataactctctctctctctctctctctctctctctctctctctctctgccattgtgtgtgtgttgtctgtgtgtctctgtatgtagggtgtttgtgtgagttcatatttgtatgaaggtacgtgcgtatatgctttgtacacacacatgtggaagctaaaggtcaacctgtggtatcattcatcaagaactaccctccttccctgtacaataaaaaaacttctagaggcatcaccatccctgacttcacgctctactatagagccatagtcctgaaaacagctgggtattggcacaaaaacagacaggtagaccaatggaatagaattgaaaaccctgatattaacccacacacccatgaacacctgatttttgacaaagaagctaaaattatacagtggaaaaaagaaagcatcttcaacaaatggtgctggcgtaactggatgctgtcatgtagaagattgcagatagatccatgtctatcaccatgcacaaaactcaaaacttaagtccaaatggatcaaagacctcaacataaatccagccacactaaatctcttagaaaaaaaaagttggaagtacccttgaacaatttggtgcaggagactgtttcctgaacataacaccagtagcacagatactgagattgacaattaataaatgggacctcctgaaactgagaagcttctgtaaggcaaaggacacggtcaacaagacaaaaacggcagcccacagactgggaaaagatattcaccaaccccacatctgacagaggcctgatttccaaaagaaaagaactcaagaagatagtcaccaaaacaccaaataatccaattaaaaagtggggtacagacctaaatagagaactctcaatagaggagtctaaaatggctgaaagacacttaaggaagtgttcaacatccttagccatcagggaaatgcaaatcaaaacaactctgagataccatcttactcctgtcagaatggctaaaatcaaaaacaccaatggcagtttatgctggagaagatatggagaaatgggatcactccactgctgttgtacagccactttggaaatcagtatggagattcctcaggaaaatgggaatcagtctacctcaagatccagcaattctactcttaggtatatacccaaaagaagcacattcatacaacaaggacatctattcaaccatgttcatagcaacattatttgtaatagccagaacctggaagccacctagatgcccctcaactgaagaatggatggagaaaatgtggtacatttacacaatagagtaccactcagcagacaaaaaacaatggaatcttgaaattctcgggcaaatggagggaactagaaaaaaacatcctgagtgaggtaacccaatcacaaaatgacaaacatgatatgtactcactcatatatggattttatacatgaagcaaaggattaccagcctacaatccacaccaccagaaaagctaggaaacaagaaggaccctaagagagacatacatggtcccctagagaagagaaaagggacaagctctcctgagcaaattgggatcatggggggaggggaaagggaactaggagaatgataatgggagatgaggagggatgaggaagacatgatgggacagggaggttgagttgggggaagaacggaagagagcaagataaaaccccctataatagaggtagacattataggtttaaagaaaaatcaggcactagggaaatatccagagatcgacaaggatgataccaactaacaatctaagtaatagtggagaggctaacttaaatgcccttctccaagaagctgatggaaacagaagcagacacccacagctaaacactgaactgaactctggaatccagttacagagagagagaagtgatgagcaaagggatcaagaccaggcaggagaaacccacagaaacagctgacctgaaaaagggggagctcatggaccccagcctgataactgggaaaccagcataggactgattcagaccccttgaacatgggtgtcagtgaggaggcctctgaaatctatggggcctctggtagtagatcagtgtttatccctaccttacgaatggactttggaagcccattccacaaagagggatattctctcagcctaggcacatggaagagggtctaggccctcctccaaatgatgacagactctgaagttccccccttggaaggcctcaccctccctggagagcagaaagtgtatgggatagggagttagtgaggggcaggggaggaggggagggagagggaactgggattgacatgtaaaacaatctcatttctaatttaaattaaaaaatttaaaaagaaccactcaccttcttttgtttgggggggttgtttgtttgttttggtttttgtttgtttgtttgtttgtttgtttttgaaacagggcatcattagcctagcacttactgagcagacaaagctggccgacaagcagggcccaggagtctgcctgttgtctccaggtccccagaactgagatgataagtacatgccacacctagcatttcaacatggtttcccgggactggatatatgtcttagcacatcattgactgggttatctcccaatcctctatttttcaaagttctgaataaatctaatctacaatctcttaaataaatattccttcctttatcttccaccaaagaagtggtagaatgtacggtgagtaagcctcataacacccaagtgtcttgaggtcagcacagcaaaagttatctgctaactctgggatcagtttgtttgtttgttttttcattcaaaacaaaaatgttggcctaaactatcttgggctaaatataaagatctgacacatccttaaataattctctggctctgagtttaaagccataggttgttaaataaatcacatttgttgccaaaaaatagactagtaccatatgggccttcttgctgtctgtaacctggattcggtgttgccataaatcatgttatgtctcctgagatacagctgacatcagattggagtgggtgtgtttgtctcattctctatggttgctacaagaaggggccagtgtctttcttacagttcagcaccaatcccaacaactctggatgctctttattctgtatgtcacatgactgacacttttattgggtaaggatgggtgtcatccacaatcatctatctttagagaaatacttcaaggcctagacttatgaaatgatactccaaagtttttctaagttggtgcctccaaaataaaagatgcaatgcttgcctgaacaataaaaatgccattagaattccatgagtcagcacagtaaaaaatatatatatatatatatatatatatatatatatatttcatatatatatatatgaaaaagtgtttatcgaagaaaatatctagctttgggtggtcctaaaatctgaggttgtagctctgagggatacggtgtggtctcactgccatcggggccacacttatgctcattagctaagtgctagataacatctcaccaccctagtgtttgccagcattttgaaatctgacaacacagggtgatatggaacaggtatatgagatttacctaaaccccacttgtgttaagcaatcaagctattcacagaagtctcatttgtagatcacacggatacacttaggcagcaatatacagaatccgcaataagtgattgctactgactgcttgagctgcaggtttaaagatggcctcatctccctttcctttgacaaccagagccccattgatcttagctcatttctacagaattcctaggcctttggttgaatgtgctcctcctctcacctgtgaattaaattaaatgttctgacagctaaagtcagtgtcccatccaagagaagacaaacccttcctgccccattgtgcttctaatactgagttttgctcagttttagtggctgaagagtgtttcagttttttatatgcaacacataaaataaaaaagtctcatactaagcttaatcattgtaccaagccagcgagaaagcatgacaccatgaaagagtcggtgtgtaagttaggaaatacgggactccatcctgctccgatactgactaagaccgagatgactcgccagtgaagcaaaagatgggaaattcacctgtaggaccattgtgagtattaaatgaagtaatcgagaccatgcaaataagagacatgattctgttatctacccaatatcacatgagatactttttgggggaagggagatgactgaatgcatatagatagatagatagatattattgctaataaaaagtcctaatatacatacaggttatattttatcattataaagtaaacattagggctaggaagatggttgagtaagagcacttgctgtgaatgcaagaggacttgagttcaaatttccagcacccacataaaagctagacattgccatacacacctgtatcctcaacactgagggttagagacaagaagatcccaggagctggctgccggtcagtctaagagaaatgtgtagctcccagttcagagaggtccagagaaatagaggaagaccccctgatgacctattctggcctctgtgtgtgcacacaggcatacacaatatgacatgaataatcaaatgttagaattcagggggtctctggggaaaaaaataaaatggtagttaccaggggctggtggaaatgggaaattaggagttactgtttagtaataaattttacttttatgaggtaaaacatggataatggggatagctgagaaattttaaaaatgcatcgagacaactgaactgtcataactaagctgggaattagttgttttctgattgttatgacaatatttgacagaagcgactgaagaaaggaagggttgcttttgactcacgggttatgggtacagtcccttgtggtgacagaagcaaggtggtaagaggcaactgatcacattgcatctgcagggaggaggcagaggcagatggatgctggtgctcagctcctagtctcctttttatcaagtctgggaccccaggccatggaatagtgaggtccacatttatggtgggcctttgcacctcagccaacccaatctagaactcactcacagagataccaagaagatttgtctcctgagtagttctagatcttgcctagttgtcaatcaatattaaatatcacaataactcttacattttatgcatcttggcacaatgaagaaaattgggactaaaagactgcacagttgtgtgttctgtgccctgttttagccaagtagatgaaaaggagatctacccatattccactctaaagagtcacacgctggcacagcactgtgcctagaagcagggatacctgtttctcatttgcacaaagtatttttatggaccagctgtgaacatgatcacaaatatcccatcaagatctcagagaattcctaaaggtattatcttcccttttcctccaaattaggaaacagagacttaaaaaaagaaaaaaactaatatgaattgtctaaggaattgaggcctaaaacaggtcttaaaacaaattggccaacgaaatgtctaactcacagtagcaatgtaagggcaaaggaattctcaaggaagtgttgagcagagaaacactggatgacaagacaaagatttcacttagtactgttcatttctagcacagttcctgttaaaggggtgatgttataccaaggatctactgcagggttgggagtatagctgaacccctgggttccaatcctaacaccatgaagaccaggtgtggtgccacaatcctgtaattccagcacttggaaggtggagacaagatgatgagaaggccagtgtcatctctggctacacagtgagtctgagccaacctaggctacatgggatgctatctcaaaagaaaagaaaaagaactttagaaaaggaggcctaactatagatacgacataataacttctaatctatccatcataatactctgaatataagaggtgaagcagacatatagctaaataagcccagtgaaggattaagaggaatgaggatagaaatggaaaacaaacatggttttctaactcatatctggaagctgatggaggattcagataaatgctctcaaaagaatttccaggaagcttagagaccagctagcctggcatgaggagcagaaaacaacacaatgccccttccaaaataaggtggaaaacaaggacaaacacccaaagctgtcctcttacttctacactcacaacacacacacacacacacacacacacacacacacacacacacacacaacacatgcacaggcacaacacaccgcaatcatactcaaatgttaaaaagaaaaaggacttctggtaaatctctctggcctgggacaggatggagcagacaactatagcatctacatcttgcagaagagactcaaggaatcatagcagataaaaccctaaaaaccaaataaatgaataccccatgacccactgatgaaagaaaatgatcaagcatttgggaaagatgagacaagggacaacaagtagtcagaagggacttgagcaaacaacaaaaaagcaaaatatgtgggctctgttaatacactctaactacagatgtgttggttttatttaaaagggtaaggtcagatggaatgggagaatctgagcctgggttccagaagtcgttgagtgaaccaacaaagcatctgtacaaatgaatatccactttcacactaggatgtggtccaggagtgggtctctaggaccacagcttgcagcatgtcagctcaaggccttctaccacctatccttgtcacatccctcccatctgtcaatctatcaaacaaggcgatcaagtccaaggcctgccagaactcaagggaagagaaaaacagatcccacatccgtgacagagtggccatgttttagaaaattatgtgggttagaaaatacaacccttgccgtttatcattgtttgtggtttatataacttagcaaatattcttgcattttggtcatgttgtgtcaaatttcctttttgttttaaaatcagagtctcgatattgtagatctatctgccctcaaactcacaaagatccacctgtcctctgcctcccaagtactgggattaaaaaccagtgccaccacacccagttcaaatttcattctttttaaagctgaataatattccatgatgtggatgtaacacatatatacatttgtctgtcagtgagtatttgagttagtcccatcatctggctatggtaaggaaagctaaaatgaatatagggaacaaatgtcttttctgagtccctgttttcaattcttccagaaacacactcagtagaagttgctttttatcgtattcaacaaatgagggaatggctaaataaagtataagcaccctggtagtgtcttctgtagaggactcaagagcgcccatgctgctacgaaccttccctattgctggcatcccaccagctcttgcctctgccatagctcatgttcccccctgatgtcttccccttgtttcctagactagagctctgtcaggagacagattgtgtcttcagccccagttcctcaatacctggcatgcaatatgagcttagtaagtgttgactgagtaaaaaatagatgagctaggaatagaacagccgtaaaccacctggtactaaacttgattcagatgttattggctgcctatcaagaatatggacctacactatcatttaaggaacacaaaaggaaaaatcttaaaatggctagaaaaatcttagaagacatacgggtacagctagcacaagaggacaccacagtgggctgtgttcttttcatatttaatagccatggatgtggtgtgtaagcttctggagaagcctagactcttggcgggggcagggcaggtgagttctcaagtatcccataggcagattgttctgtttctactcaatgactgtgactacaaatacacaggtgtgataataatcgtaaactacaggtgtgatagtaaataaacatctaacattcaaaaaccctggacctaccagcagttaaatatatgtagccaaaatatacctaatctacttttaagtgtcaaaaaaatgaacttgaatgtcaggaaaatctaaatctagtttggtctagatcgtccctcttctcacttaatctctcatccacttcaaaggcgggacagatgtcactgtcacttcctacaagaagctttctacaggactggggagatggctcttctaaagaaccagggcctgcaccccagcagccacaacaggaagctcacaatttcctgtaactcagctccaggagatccgatgccctagtctcatccacaggaccctgtgctcacctgaatatacccccacacacagtcagaactttaagataaaatcgtatattttaaaagaagcttccattccctaccagcctgtgagacacacccagtctctctctctctctgatggctccctagatgcctttttcaattttgtgcgactcttttgaggatgtaactctttgagggcaaatgttatatgcaacaaataccacctagcatatctccattgaatagcaatgcaataaatatttgccaaatgtctctacaaataaagctaaatttaaaaacttgaaacattatgtgcacatgattagcacatgatgctaatcctagcacttgaagggatggagaattttgtggttgaggacagcctggacaattctccgtctcaaaataagttaactaagttacatacacatcttgaaaaattgtgtatgtaaatatataagcatgtacatgtatatgtaaatacacacacacacacacacacacacacacacacacacactcaccactgctgtttgaagggttgcccctccagatttcccgtgttgacagtcaccaatgtggcaggactgagaaggaagccttataggagctgacaaagttgtgagaccagagcccttgtgggtatgatcagagcccttatgaaagggcttgtctccttctgtcttgtgatgacagggtctgttcctcttgttcttctaccttgtaccacgtgaatagggaagcccttacaagacacaagccccagcatcttgatagagaatttccaagcttctagaacagtgaggaaataaggttttatacttttttctatatcattacacatattcattttatgtgtggtgtatgtacacatgtgggcatgaccacgacatgatgcatgtgtggaggtcagaggataatctaccaaagttggttctctccttccatcatatgggtgccaaggatggaatccaagtcctcagacatggtggcaagcacctttccccacttactctctttccaaccccaattttctgattcataaattacccagtcatatgaattttatacaagacaaactgtccctggtcagatgtgtgctggtcaaggaagcctcactgtgactttgacagcatctgttactgaccatctacttgctctgcccaacgacctgtcatatctcacccattaactcagttgaactcactgtggttttccatgctcatatagttacttctgcatttcacatcctgtttctgaacctcagcaacatttatatttaagtcatgttttacagatatcaaaagccatcattatgtttttattttaaagataatccctcaagacttaagagtactttgttttcgtggttgtctgtgctagaattacaaagagcaatttctaaagtcaggagggtcaatagctgtattaagaaagtgcctctttttttaaattatgcttttaaaatgtaaatgcattagaaattagaacaaagtcccagctcaaatctaaattgcattcacctcagatatagtctatgtgggcattgtaagatgcccatgcctatgctagaacagacttctccaaggaaagagctgagcccgtggaacacttctaagccctgagctaaaagtgaacaggaagcaaaagaacatggcatgtgattgtcactcagcctctcctgtagctcacaccccagcaaattgtgacatgaagagcctcaatgtttcttccaatgaacccctcacagggcctttagactgcaaaatatcagcagccttggtacagtggtgaccatgtggtgagagacacacctttgtgaacactgccactgagcatggcaatgatttcagtacctttggtatcaagggcacaggcttcagtgccttccagtcatcacatgaagacccacagacactagaccaatgcctcttggctaggcccagggatgtaacataatcttacatcttcagtggctagagactgctgtggacatttaatagaggagatattattgaagtttacatagtgcagatgtttcttagagctgttgagactattttgctgaatttgaggtgactggacttgtttgagaacaatgaaaagggtatacagaaatactgttccattcgtgttgttacactgacacatttcaaggcaacactggcctataaaatgttgccaaaaaacctaaagtttcaattgaataaaatcatttcacttacaaaaaatgattccttctcagaaaacagaagatcaagcaatcatcattattcctgtttaaatgaagctatctggaccttccggtggctgctcagagcctggggactgagcctgctgaggcctggggactgtgcacagaagaactgtcccagcagatcagccctcacaaagacagccagcatcctagtcctgcctccacccacgggaagaggaaagccatcagagtattgaacctgcttgcaaccaccagaagagacccttggaccccgtacccagcagcagagggggagacactaccagcacccactggagaaagggatgggaaaacaacagtataagaacagagccagcttggtattggcacaagaatagacagatagaccaatggaatcgaattgaagacctagatattaacccacgcacctacgaacaccttatttttgacaaaggtgctaaatccatacaatggaaaaaagatagcatcttcaacaaatggtgctggcacaattggattcagacatgcagaaaattgcagatagatccatacctgtcaccatgcacgaaacttaagtgcaaatggatcaaagatctctccataaactcagccacactgaatcttctagaagagaaagtgggaacaacccttgaacaaattggcacaggagaacnnnnnnnnnnnnnnnnnnnnnnnnnnnnnnnnnnnnnnnnnnnnnnnnnnnnnnnnnnnnnnnnnnnnnnnnnnnnnnnnnnnnnnnnnnnnnnnnnnnnnnnnnnnnnnnnnnnnnnnnnnnnnnnnnnnnnnnnnnnnnnnnnnnnnnnnnnnnnnnnnnnnnnnnnnnnnnnnnnnnnnnnnnnnnnnnnnnnnnnnnnnnnnnnnnnnnnnnnnnnnnnnnnnnnnnnnnnnnnnnnnnnnnnnnnnnnnnnnnnnnnnnnnnnnnnnnnnnnnnnnnnnnnnnnnnnnnnnnnnnnnnnnnnnnnnnnnnnnnnnnnnnnnnnnnnnnnnnnnnnnnnnnnnnnnnnnnnnnnnnnnnnnnnnnnnnnnnnnnnnnnnnnnnnnnnnnnnnnnnnnnnnnnnnnnnnnnnnnnnnnnnngaaaacaaggacatatgttcaaccatgttcatagcagcattgtttgtaatnnnnnnnnnnnnnnnnnnnnnnnnnnnnnnnnnnnnnnnnnnnnnnnnnnnnnnnnnnnnnnnnnnnnnnnnnnnnnnnnnnnnnnnnnnnnnnnnnnnnnnnnnnnnnnnnnnnnnnnnnnnnnnnnnnnnnnnnnnnnnnnnnnnnnnnnnnnnnnnnnnnnnnnnnnnnnnnnnnnnnnnnnnnnnnnnnnnnnnnnnnnnnnnnnnnnnnnnnnnnnnnnnnnnnnnnnnnnnnnnnnnnnnnnnnnnnnnnnnnnnnnnnnnnnnnnnnnnnnnnnnnnnnnnnnnnnnnnnnnnnnnnnnnnnnnnnnnnnnnnnnnnnnnnnnnnnnnnnnnnnnnnnnnnnnnnnnnnnnnnnnnnnnnnnngggagctacgagaatgagaagggaagaaaaggaaggatgcagaggtcatgagggagcagcaaggttgaggcaggtgtagattagaagacaggctatgtgataggtagggcttttagttgcaaagagtgggagggggggaagggagggagaagggaactgggattgtcatgtgattcaatcttgtttgtaattccaataaaaaataaaagagagagggagccattataggttcaatgagagatctgacactaggcagattttcagagatctataaggatgacacctactgacaatctaggctgacgactactttatatgccatcctagagccctcatccagtagttgatggaagcagacacagacacccacagctatacactgaactgaactctggaaacaagttgcagacaaggaggattgatgaatagttgcagggggtggtagaggaggaagggagggagaagggaactgggattgtcatnnnnnnnnnnnnnnnnnnnnnnnnnnnnnnnnnnnnnnnnnnnnnnnnnnnnnnnnnnnnnnnnnnnnnnnnnnnnnnnnnnnnnnnnnnnnnnnnnnnnnnnnnnnnnnnnnnnnnnnnnnnnnnnnnnnnnnnnnnnnnnnnnnnnnnnnnnnnnnnnnnnnnnnnnnnnnnnnnnnnnnnnnnnnnnnnnnnnnnnnnnnnnnnnnnnnnnnnnnnnnnnnnnnnnnnnnnnnnnnnnnnnnnnnnnnnnnnnnnnnnnnnnnnnnnnnnnnnnnnnnnnnnnnnnnnnnnnnnnnnnnnnnnnnnnnnnnnnnnnnnnnnnnnnnnnnnnnnnnnnnnnnnnnnnnnnnnnnnnnnnnnnnnnnnnnnnnnnnnnnnnnnnnnnnnnnnnnnnnnnnnnnnnnnnnnnnnnnnnnnnnnnnnnnnnnnnnnnnnnnnnnnnnnnnnnnnnnnnngggatgcaatgttgtttctaattgcaactaaaaaaacttcatacacataaaataagtaattaaaaataaaaaataacagagccaacagcaaaaagatccacatgaaggcaccagagtggactctacaccagcaagacctgaacatcctatcacagatgaagcagaagagaatgaccattaaaacaactttatgaagataatagagaccctcaacaagataatgagaaaatcccttaaagaagtggaagaaaaacaaaaaaaattcaggaaatggaggaaaatacaaaacaaaaattgcaagaaataaacaaatctcttaaagaaagcaatgaaagtcaagaaaaaaacaaccaaacaaatgaaggaaacaatgcaaacagtgcaaggcttgaaagctgaaatagaaaaaataaaaaagacacagtctgagggaatagaaaagattaggaactatggatgcaagaataacctacagaataaaagagatggaagtgagaatctcaggcattaaagatacactgggagaaatagattcattgaccaaaaaaaagtcttaagtctaacaaatccctaacacaaaatatctaggaaatatgggacacagtgaaaaggtgaaaaaacacacctcaaaggcgcagaaaacatattcaacaaagtcatagaagaaaactttcccaacctaaagaaagacatgccaatgaaagtacaagaagcttacagaataccaaatagagtggaccaccaaaaataagtcccttcacaacataataatcaaagcaccaaacatacagaataaagaaagaatattaagagcagcaaaggaaaaaggccaagtaacatataaaggcagacctatcagaattacacctgatttctacatggaaactctgaaagccagaaggccctagatagatattctacaaacactaagagaccacaaatgccagcccaaactactatacccagcaaagctttcaatcactatagagcaagaaaacaagatatcccatgacaaaaccagatttaaacaatacatatccattaatccagccctatcgaaagtactagaaggaaaactctgacctgaggaagttaactacactcacaaaaacataggcaatagataatcccctttaccaaaagccaaaagaaaaagcaggataatccacacacaataccaacaacaacaacaaatccaaacaagcaattaacaatcaatggtccctaatctccctcaataataacggttttaactcacctataaaaagacacaagttaacagaatggttacaaagatagaattcatccttctgatgcacaaaagaaacacacctcaaattcaaagacaggtcacctcagagtaaacaggaaaagattttccaatcaaatggacccaagaaacaaactggtatagatatcctaaaagctaacaaattagacttcaaactaaaatcaatcaaaagagatgaagaaggtcagttcatattcatcacaggaaaaatctatcaagatgaagtctcaattgtgaatatctatgccccaaatacaaaggcacccatgctggtaaaagaaacattactaaaactaaagtcacacataaaatctcacacagttatagtgggagacttcaacaccccactctcatcaccagacaggaccactagacagaaacttaacaacgaaataaaagaactaacagaagttatgacccaattaggtttaacagacatatatatgacattcaatccaaacacaaaagaatatctcagcaccacctggaaccttctctaatatcaaccacatactcagcaacatagcaaacctcaacagatacaaaaaaaatggaataaactcctgtatcttatcaggccatcatgctttaaagttggaattcaacaacacaaatcacagaaaccctacaaaccaataaaaatcgaacaatgtgcaattgcaccattcctgggtcaaggaagaaataaacaaagaaattaaagacttccttgaattcaatgagaatgaagacacaacaacccaacttatgggacactttgaaagcagtactaagaggaaagttcatattacaaagtgcccacatgaagaatctggacaataatcacattagagaattaacagcacaactgaaagctctagaacaaaaagaagcaaactcaccccagaggggtagatgtcaggaaataatcaaattgagggctgaaatcaataaagtagaataaaggaaacaatacaaagaatcaatgtaatgaagagttggttcttcaagaaaatcagcaagatagacacacctttatctaaactaaccaaaaggcagagagagaacatgcaaattaacaaaatcagaagtcaaaagggggacataccaacagacactgaggaaatccagagaattttcaggccatactttgaaaacctgtactccacaaaattccaaaatttaaaggaaatggacaattttctggatagatatcacttaccaaaattagatcgagaacagataagcaatttaaacagacctataacccctaatgaaatagaagcagtcatcaaaagtcttccgaccacaaaaagcccagggccagatggcttcggtgcagaattcttccagcaattcaaagaagaactaatagcaaaactcctcaaattgttccacacaatagaaacagaaggttcattgccaaactctttttatgagcctgtaattaccttggtacccaagccaaacgaaaacacattaagacagagaactacaaaccaatatccctcatgaacattgatgcaaaaatactcaataaaatactggcaaatcaaatccaagaacacatcacaaaaatcatccaccacaatcaagtaggcttcatctccggcatgcaaagttggttcaccatatgaaaatctatcaatgtaatccaccatataaaaaaactgaaaaagaaaaaccacatgatcatctcactagatgctgaaaaagcattggacaaaatccaacaccccttcatgataaaggtcgtggggaaatcagggataacaggaacatacctgaacataataaaaaacaatatacagtaaaccaacagtcaacatcaaattaaatggagagagactcatcacaattcgtctacaatcatgaacaaggcaaggctgtccagtctctgcatatctcttcaatatggtacttgaagttctagctagagaaataagacaataaaaggagatcaaggggatacaaattggaaaggaaaaagtcaacctttcactgtttgcagatgatatgatagtttatataagtgacccgaaatactctaccagggaactcctacagctcataaaaacctttagcaaagtggcaggatacaagattaactcaaaaaaatcagtagccttactatatacagatgataaacgggctgagaaagaaattgaagaaacatcaccctttacaataaccataaacaacatataatatcttggggtaacactaacaaaataggtgaaagacctgtataacaaagactttgagtctgagtctttaaagaaaaatattaaaaaagataccagaaaatggaattatcttccatgctcttgtataggtaggatcaacatagttaaaatggcaatcctgccaaaagcaatatacagattcaatgcaatccccatcaaaatcccagcacaatttttcacagaccttgaaagaacaatactcaactttatatggaaaaacaaaagaactaggatagccaaaacaaccctgtacaataaaggaatgttcagaaacaccacatccctgaattcaagctctataatagagctattgtcctgaaaacagcttggtattggcacaaaaatagacaggtagaccaatggaatagaattgaaaaccctgatattaacccatactcctatgaacacctgatttttgataaagaagctaaaattatacattgtataaaagaaagcatcttcaacaaatggtgctggcataaatggatgctggcatgtagaagactacagttagatccatatcaatttccatgtacaaaacttaagtccaaatgaaccaaagacctcaacataaatccagccacactgaacctcttagaagagaaagtaggaggtacccttgaacaaattcgtgcaggagaccaattcctgaacataacatcagtagtacagacactgagattgacaattaataaatgggacctcctgaaactgagaagcttctgtaaggcaaagggcacagtcaacaagacagaatggcagcccacagatgagaaaagatagtcacaaatcctacacctaacagagggttgatttccaaaatatacaaagaattcaagaagctagtcaccaaaacaccaaataatacaattaaaaagtgggatacagacctaaatagagaagcctcaatagaggaatctaaaatggctaaaagatccttaagtgctcaacatcctgagccatcagggaaatgcaaatcaaaacaattctgagatgccatcttgtttctgtcagaatagctaaaataaaaaacaccaataacaatttatgctggagaggatgtggagaaaagggaacactcccccactgctggtgggagtgcaaactcatacagtcactttggaaatcagtatggctatttgtcaggaaaatgggattcagtctacctcaagacccagcaatttcactcttaggcatatacccaaaggatacacactcatacaacaaggatatctgattaactatgctcatagcagcattatttgtaatagccagaaccttgaagcagcctagatgcccctcaactgaagaatggatagagaaaatgtggtacatttgcacaatggaggactactcagaagaaaaaaaaacaatggaattttgaaattcgcaggcaaatggatggaaccagaagaaaccatcctgagtgacgtaaccaagtcacaaaaagacaaacatggtatgtactcacacatacacagattttaaacatgaagcaaagaattaccagcctacaatccacactatcagagaagctaggaaacaagaaggaccctaagagagacatacatggtcccttagagaaggggaaaggaacaagatctcctgagcaaattgggagaatggagtaaggggagagggagttaaaagaaagaaaagggggtaagaggaggggagaggaggacatgagggaagaggaagcctgtgtcaggggaaaaatagaggagagcaagaaaagagataccatcttagagggagccattataggtttaaagagaattctggcactagggaaatgtccagagatttacaaggttgaaaccaactaacaatctaagcaatagtggagagactaccttaaatgcccttctccaataatgagatttatgactaccttatatgccatcctagagctttcattcagtagctgattgaagcagaagcagtccccacagctaaacactgagccgaactcctggaatccagttgcagagagagaggagtgatgagcaaagggatcaagagcaggctggagaaaccacagaaacatctgaagtgaacaaggaggagttcatggaccccagactgataggtgggaaactagcataggactgacccagaccccctaaacatgggtgtcagaaggactgagcattctattagaggacccggcctctgttagtggatcagtatttatccctagtatacaaatggactttgggagcccactccacacaatagggatactctctcagcctagacacactggggagggcctaggccctgctccaaaggttatgacagactctgaaggtcccccatggaaggcctcaccctccctatggagcagaaaggggatgggaccgagggatggtgggggagcaggggaggaggggagggagaaggagctagaattgacatgtaaaacaagattgcttttaatttaaattaagaaaagaaaaaataaatcaggctatctgatttctttaaatgtagagttttaaatttaaaagttaaatgcataggagatagttcagttcaaaagtgcatgccttacatgcacaagtcctaagtgcctgcccagcatccagctaaaagctgaggagcctatacccacactttcatgtcagacttccttctgagcatctttttctcctaaagctaatgcttaaacctatattaaaatatctttaataaaatctttaacactgtttcattaaaaataaaggctaggtgtgggtgtgtacctatataatctcaagttgggaaggcagagacaggaagatccctaggaattactggccaacagtctagccaggttagtgagatgaggattcagtgagaacccttatatcaaaaagggataataataataataataataataataataataataataataataataatgttaaaaacaattaagaaaaatactcaacatcaacctcagacatccataagcatacaatacaagaaaataatgaaaaaaaatgagtacaagtgtttataaattcccattaccacctccaagatgaactagaggaagtggaaagattgtaagagtcagagaagatgggggacacaggagaacaaggccctctgaatcaactaggcaaggtgcagatgagctcacagagactggagcagcaagcacaaggctacatgggtccgtaccaggtcctctgaatatgtagctaacagctatatatggaaatcctgaatatgagaaggagtgggtctctgactcttgtgcctgctcttggaactcttttcctcctgctgggttgccgtgtccaactttgagatcatagtttttgcttcatcttattatatttagttttatcatgtttggttactatctcttaaaagcctgtttttttctaatgaaagaaagggggtggattaaggggaggggaagaggagaggaactgggaagattagagggggaagaaagtataatcatgatatattgtatgagaaaataatctattttctttttttaagatttatttatttattatgtatacagagttctgtctgcatgtatgcctgctggccaaaagaggtcaccagatttcattacagacggttgtgagccaccatgtgattgctgggaattgaactcaggacccctggaagagtcagtgctcttaacctctgagccatctctccagccccggagaaaataatttattttcaacaaaaacattttgtcataaatactttcaatcagtgggcaatggtagtgcacacctttaatcccagcacacaggaggcagaggcaggtggatctctgtgagtttaaggccagcctggattacaaagagagctctaggacagtcagagctgttacacagagaaaccctgtctggaaaaaaaaacaaaacaaaacaaaaagatacttccaaaccttttcttttgaaatataatgcagaagagtaaagatcctgcttcctaatacccctcctccattccatccccatgcctcaccccatcccatcgtcgatgtgtacaattttcaaatacaccacacatgtgtacataattaactacaaagcaagaatataaagacaagggatggacctattccaagggacaattttaaaataagaaatgaaaagagactgttctagtcttcttataaatgctataagctgtaacaaaccagtttaattcctccttaatgcaaggggaattaatcaagagtaaccaatcaaatgctttcagtatagaagaatattagccagctgtatctcactcctctatttggttaagtgtgagaaaatgataggagacggctgagagctggaaaccacagataagatagcatttcgtccttccagcgagccttccttcagaaactgggagaggagcctatgagagactcacgattgatctctgagcagtaagtagctggaagagccataatcctggccaagcctcaaggacaaggcacatctctgaacatggctttcgattccaagctaagaaatgcgagataggctacaggaaaagtattctaattggggcccacaggtgtttggttacaataaatagatccacccaaaaagtgagtgggaaagctacgctgttcttccttcatttccccggaagtttcttcggattttaaggatgactatggagctcggttttataatcgttaaagatatttaaataaggctctcaattgaaaagcaataatgtacagatggcggattatgcattcgggactagatttctaattaaacaaggagattaaatctattcctttatctccgcacttccctgaaatttaagcactattaatattaaaggaataaagacacacattagctccccagccctcagagcctgcatgaggcccagcaatttaccctagacttggaaagaggaaaggaaatctctcagacagcaaatcagggggtgcagagaacagggaaagagggactatcaaggtctcaggatgggaggcagtaggaacttgtggtaactgagaggcaaacagaggaactggaaaccaccagagtgggggatatgagaaggcagtagaactgagcccttcgtgtcacgtaattccagaaaatgaaagatttggaagtgatgggatacagaccagtcccggcaccctcttttgtcctcaacaaagcacaaaccagttaagatataaatatgaaacccagagccaggggagcacccttaatgtggcttggatcctggaccagcatgtagacaaactaatgaaatccaaatttacatctgcggattggctagttgttgctgctgttgttttttgtgtgtgtgtgggggggggggggtttggttggttggttggttggaactcacagagatctacctgcctctgcctcccaactgctgggattaaaagcatgagccaccaccaccaggatagtcttaatatattcagaacatcttattttcagctgtggtgtgtagtcagtaaaatgccaccactagggaaagtggggtaaaggctacaaacatagggctctgagtacaatttttgcaacttttccatgaatccaaaattactgaaaactaaaacacttattaaagcaaaatgttttcttctttttaatagacaatggatacttttattatttactcaggtttaggtcatggagactcgattccttttagtgtccaactgttgtatttataactcaaacttctaatgaagctgattttttcatgcttaaacctgttttcattttactttagaaatgatgccagctcatattttgaatgcctgtacctttcctcactgacaagtggaagagtgagggaagaagttacagtcaatgggaatagaccctataagactattcttttttttccattcatttgtttagctcataaataaagtcatgcacaattatgatacagaatacagtatgttcacaatggcatggcaaaattaaaccaattaacatgttatatcacacatattcatcatttttgttttgagtacactaaaagtatacgatctcacaacttttaaaatatagcatattgttatcaaccatatttatcatgctctcagtagaccttaagacatcacagagtccatgcctcttgtccaactgcagttttatatccttaaaccaatcatttccccattgttaaaagacccacattgaagcctaatagccacaactctgctctctgttcccataagttcatcatttctaggttacacataaaactgaaattgtgtgatatttgtcttccagtgtgtcacttttttttggcaagcatataactttactaggcacactccatttaaaaaaaaacaaacaaacaaacaacaacaacaaaaaagtaaaaaacaaaatcccagaaaacagcacagttctgttactcttgtgatacttggcaccatttatttttttaaattagcttctcaatcatcatctgggaggaaaccattctgagcaacatcattaaaaacagctctgataaagcatggtcaccactatgtatcatagagcaggtccacatatgcgtgagtacatatcatgtttgtctttttgtgattgggttaccttgctcagaatggtttcttcgagttccatccattttcctgcaaatttcaagattccattgtttttttctgctgagtaatactccattgtgtaaatgtaccacaatttctctatccattcttcagttgagggacatccaggctgcttccagtttctggctattacaaataaatgctgctatgaatatggttgaacatatgtccttgttatatgaatgtgcttctttagggtatatgcctaggagtggaattgctggaacttgtggtagactcattcccattttcttgaggagtcgtcattataatttccacagtggctgtacaagttggcactcctaccagcagtggaggagtgttcctctttctcnnnnnnnnnnnnnnnnnnnnnnnnnnnnnnnnnnnnnnnnnnnnnnnnnnnnnnnnnnnnnnnnnnnnnnnnnnnnnnnnnnnnnnnnnnnnnnnnnnnnnnnnnnnnnnnnnnnnnnnnnnnnnnnnnnnnnnnnnnnnnnnnnnnnnnnnnnnnnnnnnnnnnnnnnnnnnnnnnnnnnnnnnnnnnnnnnnnnnnnnnnnnnnnnnnnnnnnnnnnnnnnnnnnnnnnnnnnnnnnnnnnnnnnnnnnnnnnnnnnnnnnnnnnnnnnnnnnnnnnnnnnnnnnnnnnnnnnnnnnnnnnnnnnnnnnnnnnnnnnnnnnnnnnnnnnnnnnnnnnnnnnnnnnnnnnnnnnnnnnnnnnnnnnnnnnnnnnnnnnnnnnnnnnnnnnnnnnnnnnnnnnnnnnnnnnnnnnnnnnnnnnnnnnnnnnnnnnnnnnnnnnnnnnnnnnnnnnnnnnnnnnnnnnnnnnnnnnnnnnnnnnnnnnnnnnnnnnnnnnnnnnnnnnnnnnnnnnnnnnnnnnnnnnnnnnnnnntcttaagttttatgcaaggtgaaaggcttgggtctatctgtagtcttctacatgtttgcatccagttatgccagcaccatttgttgaagatgttctctttgttccagcataaatatttggactgtttggcaaaaatcaggtgtttatgggtgtgtgggttaatatcagggttttcaactctattccattggtctaccagtctatttttgtgccagtaccaagctgttttcaggactatagctctgtaatagagcttaaagttagggatggtgatgcctccagaagttcctctattgtacagggttgttttggctatcctgggtcttttgtttctcaatataaagttgagaattgttttttcaaggtctgtgaagaattgtgttgggatattgatagggattgcattgaatctgtagaatgcttttggtaagattgccatttttactatgttgatcctgcctatccacgagcatgggagatctttccattttctggtatcttctttaatttctttctttagagactcaaaattctaacactaaccacttttttggttagtgttactccaaggtattttatgttgtttctggcaattgtaaagggtgatgtttctctgatttctttctccaccaatgtgtcatctatatatagtagggctacagttttttttgatttaatcttttatcctgccactttgctgaaggtgtttatcagctgtaggagttcccttgttgagtttttcgggtcacttatgtagactatcatatcatctgcaaatagtgagagtttgagttcttcctttccgatttgtattcccttaaactccttttgttgtcttagcgctctagctagaacttcaaggacaatattgaagaggtatggagagaatggacagccttgccttgttcctgannnnnnnnnnnnnnnnnnnnnnnnnnnnnnnnnnnnnnnnnnnnnnnnnnnnnnnnnnnnnnnnnnnnnnnnnnnnnnnnnnnnnnnnnnnnnnnnnnnnnnnnnnnnnnnnnnnnnnnnnnnnnnnnnnnnnnnnnnnnnnnnnnnnnnnnnnnnnnnnnnnnnnnnnnnnnnnnnnnnnnnnnnnnnnnnnnnnnnnnnnnnnnnnnnnnnnnnnnnnnnnnnnnnnnnnnnnnnnnnnnnnnnnnnnnnnnnnnnnnnnnnnnnnnnnnnnnnnnnnnnnnnnnnnnnnnnnnnnnnnnnnnnnnnnnnnnnnnnnnnnnnnnnnnnnnnnnnnnnnnnnnnnnnnnnnnnnnnnnnnnnnnnnnnnnnnnnnnnnnnnnnnnnnnnnnnnnnnnnnnnnnnnnnnnnnnnnnnnnnnnnnnnnnnnnnnnnnnnnnnnnnnnnnnnnnnnnnnnnnnnnnnnnnntggtaatgacccttctgcttctattgtgtggaatgctttgaggagaattggtattagctgtactttgaatttctggtagaattgtgcactgaagctatctggccctgggcttttttggttgggagacttaatttccatgagtttgtaggttttctgtagttcatgttgttgttgaattctaattttaaagcatggtggtctgataagacacagggggttatttcaagtttttttgtacctgttgaggtttgctatgttgccaagtatgtggtcgattttagagaaggttccatgtggtgctgagagaaggtaaattgttttgtatttgggtggaatattctatagaaatctgttaagtccaattgcgccataacttctattagatcttttgtttctttgttaagtttctgtctggtgttcctgtccagtggtgagagtgggttgttgannnnnnnnnnnnnnnnnnnnnnnnnnnnnnnnnnnnnnnnnnnnnnnnnnnnnnnnnnnnnnnnnnnnnnnnnnnnnnnnnnnnnnnnnnnnnnnnnnnnnnnnnnnnnnnnnnnnnnnnnnnnnnnnnnnnnnnnnnnnnnnnnnnnnnnnnnnnnnnnnnnnnnnngatggtggtgagattatgtgtgggattctgtccctttttccttttggctgttggtaagttgggattatctattgcctatggttttctggttgtagttaccttccctaggttggaattttccttccaatactttctgtagggctggattggttgatatgtattgtttgaatctgcttttgtcatggaatatcttgttttctccaagtataatgattgaaagctttgctgggtatagtagtctgggctggcatccatggtctcttagtgtatgtataatatctatccaggatcttctggctttcagagtttccaaggaaaagtcaggtgtgattctgataggtttgcctttatatgtttcttgacctctttcctttgctgctcttaatattttctctttgttgtgtatgtttggtgttttaattgttatgtggcaaggtaacctttttttggttcagtctatttggtgttctgtaggcttcttgtattttcattggtatgtctttctttagtttgggaaagttttcttctatgattttgttgaacatgttttctgcgcctttgagttggatttcttcaccttcttctatacctattattcttaggtttggtcttttcacagtatcccatagttcctggatattttgtgatagggatttgttggacttaagactttctttggttggtgagtctatttctgctactgtgttttcaagccctgagattctctcttccatctcttgtattctgttggttatgcttacatttgtagttcctgatcatgtacccagcttttctatttccagcattccctcagattgtgctttcttcattgtctctatttcagttttagtccttaagagattgatattgattgacttgaagattgatatcttgtaatttttggttagttttttcttacatttctttaagggattttctcacgtcctctttgagcattgtgatgttcaggtcttactggtgaagagtgaacagcccccagccaatagtgctaaggttttctttattgagatacaccaatcaagctagaggagggagcttgaaccagcgccagtagccgggggagcagaagagagaaggccggggtctccacgtgcagcccttaagaaccttcccttatgtcacccaggacttcccttcacccgccctcatgggcgtgtcccggtacatctgacacctgtctgggttgcctggggcggggctagggtgtctccctacaattccccttttagtctaaaagaggattaaaacttaatagtgtaaaacatccaaaattaacaatcataaaggtgaaatacaagaagatacaataatctgctattgcacattctaactatgtctattccggctaagccctaaagtcatgtagaaagggtatctaacttgaacacctccttccagtcccaactctaaacaataagaaggtcattcttaactaggcttacactaccctaataaacaataatgggtttcaggggcgtagcatcttctaagttacttcctactgaaatgggacgatggtagccatgtggggtcctgtggggggaaaaatgctagtacagggaaagtctctaatgagttatgtctagtccatgttagatgagatttgcttgattgaagatctaggttgaaatcctcaacttgattgaagtcattactcgaggttctggttggagtgtcagtcgaaacggagtgagttgaatccagtgcagtcggggaggtgtagtccaattctttttccagagcatgcagggattgttgtcaggctggttcccattgactgtatgggactcaaacataagtgtcatcagagaaatgttcgcttgtacatgtatgtgtactgggaaaggcaatccttgaaaaacaacaattatgagagagtgtaggccttgaaagaaagagccaagaaaagacaaagatagtcctcttattctttatttattctgtattacagcaattggcttcttgatataacacagaaactttaaaattttgttaaataacatgcttggattttaggataggaaagccaaatccaagtctaaatccaacatcgatttaattgaatagggactagaaaatgaagagaaatagagttatttgagactacagctgtatattttaccgtatggcacgttccttttatttgatggttatagctacgttctttccttaagtatctacacatgtagtgnnnnnnnnnnnnnnnnnnnnnnnnnnnnnnnnnnnnnnnnnnnnnnnnnnnnnnnnnnnnnnnnnnnnnnnnnnnnnnnnnnnnnnnnnnnnnnnnnnnnnnnnnnnnnnnnnnnnnnnnnnnnnnnnnnnnnnnnnnnnnnnnnnnnnnnnnnnnnnnnnnnnnnnnnnnnnnnnnnnnnnnnnnnnnnnnnnnnnnnnnnnnnnnnnnnnnnnnnnnnnnnnnnnnnnnnnnnnnnnnnnnnnnnnnnnnnnnnnnnnnnnnnnnnnnnnnnnnnnnnnnnnnnnnnttttttccgtagtccagtgtctttccgcagctgtttgtccattgtctttggcattaagaaagtttagcgttaataaagcattatgcaatctatgtttgggggtttcgccttaccagcttgcctatggagcatctccttgagtgtcctgttggaccttacaacaactgcttgtcctgtagggttgtgtggtatacctgtgacatgcttaatgttataatatttgaagaactgttccatttttgtggagacatatgctggagcattgtcagtttttatctgcaccggtatacccataactgccatcacctccagtaggtgtgtaataatgnnnnnnnnnnnnnnnnnnnnnnnnnnnnnnnnnnnnnnnnnnnnnnnnnnnnnnnnnnnnnnnnnnnnnnnnnnnnnnnnnncctccgaaggcctttaggattacagcctgctggcagcagagtttggttataaaaggaacaaataggacagtttctcactatctccttggcttgttgccaagtgatggtggagaagtcctttaaatccttgctatttacatgatgctttttatgaaattctgaggcttctagcacggtgtcaatcaatagacgatcaatctcgtcattgccttgtgccagcgggcctggcagacccggatnnnnnnnnnnnnnnnnnnnnnnnnnnnnnnnnnnnnnnnnnnnnnnnnnnnnnnnnnnnnnnnnnnnnnnnnnnnnnnnnnnnnnnnnnnnnnnnnnnnnnnnnnnnnnnnnnnnnnnnnnnnnnnnnnnnnnnnnnnnnnnnnnnnnnnnnnnnnnnnnnnnnnnnnnnnnnnnnnnnnnnnnnnnnnnnnnnnnnnnnnnnnnnnnnnnnnnnnnnnnnnnnnnnnnnnnnnnnnnnnnnnnnnnnnnnnnnnnnnnnnnnnnnnnnnnnnnnnnnnnnnnnnnnnnnnnnnnnnnnnnnnnnnnnnnnnnnnnnnnnnnnnnnnnnnnnnnnnnnnnnnnnnnnnnnnnnnnnnnnnnnnnnnnnnnnnnnnnnnnnnnnnnnnnnnnnnnnnnnnnnnnnnnnnnnnnnnnnnnnnnnnnnnnnnnnnnnnnnnnnnnnnnnnnnnnnnnnnnnnnnnnnnnnnnnnnnnnnnnnnnnnnnnnnnnnnnnnnnnnnnnnnnnnnnnnnnnnnnnnnnnnnnnnnnnnnnnnnnnnnnnnnnnnnnnnnnnnnnnnnnnnnnnnnnnnnnnnnnnnnnnnnnnnnnnnnnnnnnnnnnnnnnnnnnnnnnnnnnnnnnnnnnnnnnnnnnnnnnnnnnnnnnnnnnnnnnnnnnnnnnnnnnnnnnnnnnnnnnnnnnnnnnnnnnnnnnnnnnnnnnnnnnnnnnnnnnnnnnnnnnnnnnnnnnnnnnnnnnnnnnnnnnnnnnnnnnnnnnnnnnnnnnnnnnnnnnnnnnnnnnnnnnnnnnnnnnnnnnnnnnnnnnnnnnnnnnnnnnnnnnnnnnnnnnnnnnnnnnnnnnnnnnnnnnnnnnnnnnnnnnnnnnnnnnnnnnnnnnnnnnnnnnnnnnnnnnnnnnnnnnnnnnnnnnnnnnnnnnnnnnnnnnnnnnnnnnnnnnnnnnnnnnnnnnnnnnnnnnnnnnnnnnnnnnnnnnnnnnnnnnnnnnnnnnnnnnnnnnnnnnnnnnnnnnnnnnnnnnnnnnnnnnnnnnnnnnnnnnnnnnnnnnnnnnnnnnnnnnnnnnnnnnnnnnnnnnnnnnnnnnnnnnnnnnnnnnnnnnnnnnnnnnnnnnnnnnnnnnnnnnnnnnnnnnnnnnnnnnnnnnnnnnnnnnnnnnnnnnnnnnnnnnnnnnnnnnnnnnnnnnnnnnnnnnnnnnnnnnnnnnnnnnnnnnnnnnnnnnnnnnnnnnnnnnnnnnnnnnnnnnnnnnnnnnnnnnnnnnnnnnnnnnnnnnnnnnnnnnnnnnnnnnnnnnnnnnnnnnnnnnnnnnnnnnnnnnnnnnnnnnnnnnnnnnnnnnnnnnnnnnnnnnnnnnnnnnnnnnnnnnnnnnnnnnnnnnnnnnnnnnnnnnnnnnnnnnnnnnnnnnnnnnnnnnnnnnnnnnnnnnnnnnnnnnnnnnnnnnnnnnnnnnnnnnnnnnnnnnnnnnnnnnnnnnnnnnnnnnnnnnnnnnnnnnnnnnnnnnnnnnnnnnnnnnnnnnnnnnnnnnnnnnngctctttttcttcctcagcagataatatttgtggactgtttaagtccttatcaccctttagtgccatttttaagtgctttaagtcatgtccttccacaccaataatcgtctgtaattaagaaatttctcctagtagcttttgaagactgttaagagtttgataacggtcccttctaatttgtaccttttgaggtctgattctttgtaagtctatcttatatcctaaatagttaatagaatctcctctttgtatcttttctggggcaatttgtaaatccccatctaggcagaacctccttcaacattttaaacatacgttccaaagtttccttattagaatccgataaaagaatatccatccatataatgataaacaagagattgtggatattttttaccaattatttccaaaggatgttgcacaaagtgttgacacaaagtgggactatttagcatcccctgaggtaaaaccttccattggtatctccgaactggctgtgagttattaagagttggcactgtaaatgcaaatttctctctatcgctttcttgtaatgacatagtgaaaaagcagtctttcaggccaattactatgttcagccatcctttaggtattaaggaaggcaatggcattccaggctgtagagagcccataagctgaattaccttatttatggctctcaggtctgtcagcattctccagttacctgacttcttcttgataacaaatacaggagaattccaagggctggtagattgctctatgtgaccagcctctagctgttcctgtactaacttttctagagtctctagcttttcagaggtcaaaggtcattgccctatccagaccagttcatctgtaagccatttcaatggcagggcctttggttcctctgaagtcctctgaaggtctatcatttgtatttagtgtctgtacagcctggatagttggtaaccattttttatggcatcttacccgatcctttctactatccagcgattttttagaattcgtatctgacactggagggatgttaatttgagtattccattgttgtaataaatcatgaccccataaatttataccaatatctgctacgtaaggatttagtcttcctttttgtccttccagtccaatatagaccaccgagttaacactccatcgaactctagatagagttccaatttgcctctttagggggccatttcttaggccaggatttctgggtgataatagttacatcagctccagtgtctacaagacctttaatagctctgccattaatttttatttctaactgaggccttttatcattaatagaaacttgccaaaatatgcgtttctcattttcaccagtcacatgtgattctttatcactattcaaattaccttctagagcagtatcattttccataataagcaaggaactatctattcgtcctgtgagagattgtcttccattgtcacagggaacaatcaaactgttctcgaggcgggggcctgctggaggtcccctttggagtttcccaacgttaataggttcccttgcatgtccctagtcgatctgcattcgttagtccagtgtttgcccttaccatatcacctacataacccagagggcaaatgacctgtcacgtggggaatcgttagaatttctctgtctacaatttctccttnnnnnnnnnnnnnnnnnnnnnnnnnnnnnnnnnnnnnnnnnnnnnnnnnnnnnnnnnnnnnnnnnnnnnnnnnnnnnnnnnnnnnnnnnnnnnnnnnnnnnnnnnnnnnnnnnnnnnnnnnnnnnnnnnnncccctgtaaggtgctcttccttcccaagtccttctgttgctatcttttctaatctcctgatgtctgttgaaacctctagggacagcttcttctgcccagattccagcatcttgtatgttacagtcaacttgggcagtatgtagaacccattcttctagtggagctgatctgatcttcagaggcaaaagtattcttttgcacattgggtttgcattgtcataagctaagctataaacaattggatgttggatcgttggatctgctacctgtatgtctactggtctggtcaatcggtctaagaaatccttaaatagttctgtttgtccctgttctattgtcgcataagcttctagtcattctcctgattcacaaaccttatcccatgcatttagtgttgctggcctgcataggtactgcatatggtcgtcatattcagcctgaatttgtggctcagcataaataccttctcctaggattttttggagggatgcatcaattccgtccctggtggttctaggagtctgctctcttccctaaataactcgggtggtgggtccggttgggtgccacgtgaagagtgaacagcctgcagccaatagtgctaaggttttctttattgagatacaccaatcaagtgagagggagggagctggaaccagcaccagtagctgggggagcagaagagagaaggccggggtctccacgtgcagcccttaaggaccttcccttatatcacccccgacttcccttcatcccaccctcatgggcctatcccagtacacctggtacctgtctaggttgcctggggcggggctagggtgtctccctacatactgtgtatggttcctggtctccagtggtatcatattgggttttctgttgttggatatgtttttaccttgtcctcttctcatcctttcttctggtgggtgtagcaagagtttcttgttctcctggtgggtgtgggaccaaggttctcttctggtagatgcaaacagatccaatactctgatgtcggtcctcttctcgtgaatggaggttccccgggtgttggcagtgttggggtgtgcagggtcctgggccggtggatggaggtgggctgcctctgggtgttcggtgtttggaacccatcgccgaactggtccagcatgcaggtcacttgcgtcagggtcccaaaatgtcttcttgattactaagaaagctcatattagaaaacagcttatcctgaatttgaaaaatgtatccattttatctcccctcacatagaccaatttgcctagtcatgactgtaggcaatgaagagcaactcacatcttaccatgaaatggagccagtaggctctcagctgccccaaccaaaggcagatgatggtgcatgcttatttatttatttatttatttatttatttatttatttattttgagacggaatctcatgtgttcaggctggtcctgaactcattaggtagccatggatgaccttgaacttctgccccccgcccttatttccagggtgatggaattactgctatgccctaccactcctaatcaggggccaacctaagatgtcattcctaaaaatgaagtgctctgtcagctgagcaatatgctttcttacagacaacataatctccaccattagcgtctttgggtctcccaaatgaaaggtgagggacagaagggctgagctatactactcaaaattagtaaagaccccatgttggtggtatcatgttactatttctgtagcgaaatgcctgatacaatcaatgatacaattacaggaaataccttgccccacattactgcaagtttcagtccataggcagttggctgcattatttgggactcacacaagcagaatattgtagctgcaggtacatggtggagcaaaacttgatagtggccagagatagaggcaaagagagagaggagtcaaggtcccaatatccccttcaagagcacacccccagtgacctaaattcctcccaccagaccctacccctaaggtgacaccaggagaccaagccttgagtacatgtgcctttgagggacacataaggcccaaacaataacaaacaataattaaccataaagcatacctttattatctatgtattaatttacttcaacagaattaatagttacagtacagattaacataacatattttgtgaaaaataattattttccaaagggaaaatacatgaaaaaaaagaaatggccttgatgtacaattttttcaagtctcttctttaacagaagccagctagagtctcatctgtgcttctgcattcaatctgtcaggatagcacaggtcatgttgccttgggaaacttctctagtatgctcataggaaaataaaaatgaagtggataaataatggcttagtattactataaaaacattttgacccatcagacaccagagattccaggaccacatcttaaaatctgccattctaacaaatgcccctctacatgcagaaactgcaaggtcaatgctgccctaagaggagccagcaaggccctataataaaagctagaagaaaggtgaatctgagatggaaagcctttgtctaaatatctatagagcagccaaacccctgccccaggacctctggttcagctgacacagttgagtgacaatttctttctccatgttagcaatttactaagaggctgagtcttacagtctctagacacaggaatactaagcagaactgaagaacattctctaaagcagaaaggcttctagtgggcttctagaatccagatagcctgatttgttaacaatcccttaatacacacgcatgcatacacacacacacacacacacacacacacacacacacacacacacacacacacacacacggcaaaatattaggtaacttttccctgaagaaactaaacaattcaagaaaaaaaacactgcattgatatccatcaatgaatagctcaaatcaattactgtaaattattgttccaatcttgacaagccttgtgcctacacacacagctttagctacagtcttatgtgctaatagttcagaataactcaactagacactctcaggaagaaaatgaaaggacaaaatgtgtgagaaaacaaagagaaaggaacattcattaaatgccatagtaagttaagaatagaaaaacagatatctaaaattgagagatagctttgagtaaggctttcagaaaatagatcagagaaaaatagattgaaagaatattacttagaaaatcaggaatttaatatataacatgaagaaaatataatcccagaaagaggaaacttacagatttgagaaatttttcaattttaatgaatacataagaaaagcttcatagaataaagagtttaggcttcaaggttgagagattttatattttaccaagaaaatacacaaatataggaaagggtagaacatacatataaaactccagaatgcaagaaaaaaaagaaaagatcctaaaagttccaaaaatacaaaagtagacacatgacaaagagattcaaactggcatcaatctgactaacaactctggaaaccatggcaatgaagcacagcctggacaatcctcggggaaaatgaatccacgcagaggtcatcactcagtattgagaagagagtacagacacatacagaaatgtaggctctaaaaaagattgcatcgcacataacctttcccaaactgcaacagaagaaacaagcctggctgaggacgaagctcagttggtaggtagaatacatgatgagcacaggcaacactctaggctccaccccagcataactgaaaaccagatgaggtggtgcacacccataatcccaggacaagaagatgaaggaaggagtgggatgaatgagagggatgatgtaatagggaacttagaagccaagcttcagatgacttcactgctggaagaaacctgaagcagagccatacaggtgagctgtccctgcattccctagtcacaaaaactgtaagagaaaaacaacaattgatacttttgtgctgctaaatgctaaggtgatttgttacaattaagcaaccaactcacaggtaatcgagaacataagaaacccaagataaagaaacctagagcatagccgtgcagtcctctcagagtacataacctagctatgagtgtgaagcctcccccaaaagcacaactgatatgtcttacctatttttatagtaggccaaagttgcgttattttacttcaaaatggatatgtgtttcattgtattcacaaaatacaattttacactaaagtgctaaaaaattatacaaagttaagcaaaaggagaagtagtcattattaaatctaagaggaaaatgtgttctagaaagtagatagcatatgtgcagatcaagtgtgaaaaatactttatatcatcttaggaacaaaaatagtgaacactgatttgccctcaaaattctgttgtttctgctggaaatgccagagataaagatgtatggtagaaagggtagaaagtttgcaatttaagaaggctgaaggatatcttttcttttatatttttccttccctttgttcttcacgtgtgtgtgtgtgtgtgtgtgtgtgtgtgtgtgtgtgtgtgttatttgtttatgtgcagatgcactcatccatttgtgggggtgtggaggccagaagactatgtcaggatgtcttccttcatcattctcagccttgtttttgagacagggtctcactgaacctgcagctagactagctgtccacagagccccgagaatacacgtctccacccctcaagctctaaaaaggcatacactatcacagccaggaaggactctttccacacactttgtcatcagctttgtctcagaaaacaatccgattaaaataaaacttgaactttaacaagatttatctaccacagggtaaaacagggtaaaataaatatgcaaaggcttcaatgaataaatcactcaacagaaactttacttctctaagtcaggagccaggagatgatatgaaaactagaaactgttaaatgaagttccctctgagagataggactgagatcagtcttctaatagcccttcctacaatttcaatcatctgccatgactaatctccattgtcaaggtgatgggagtcaccacatgcatacaccttcagaagtatctatgaaggtatttccacaaaggtttagctgagcagagaaaatgcaccctgaatgtgggtggcattgtcccaccagtggggatgcaggactggatgaaaaggagaaaacacgcagagcacttgttctgcttcctgactgtgatgctctgggactgactgccttatggtcctgccaccacacctccccagcagagagactcccccctcaagctgtaagacaagagaagttcttcctcctttaagttgcttcttgttggatctttggtcacagtcaggagaaaagtagctaacatacctgggaaatgctatcccaaaacttttagatgacatttcaaagtcaatgcaggggttgggaaaaggtgtttggctctgctccacctggaaacacacaggaggacttggctcttctgggaagtctgtggtctgcagatcatgaattctggctccttgtactctgcctctgcctccagtgccatctaaattcctaaagtaactttatttaccatgctgacttgcaaacatactgtcagacactagaaacagcagaaaatcatgaccattagagactaaagggcacagagcatagacacacccctcacgtccaggggtctcttctctcattgaggctgcagtccaaagagtggcaagagacagaaaatgtggttatgaagtgcctcacccacccagaggcatctttcagctctcagtgtccttttggagccagcacagatgggagactagatatctcaggacagtaactgagatgagtgaccatttcctacagagatccaacatgttttcaaagccaaagaaccacagctatccaaaccttacacagaatatctcgacaagacttgagtttcatgcttcaacagccaatgcttcaacagccaagcaggtacccccaaggctgcctgtcagaatacagatagctaacaaaaagacaagcaactctggatcaaagggtaaagacatgtcacttcctcatctctttgaaattgtcccaagacccaagacagatgtttgactccttcacatctaaagccaattaaccaaattgagttggctgagtttgaaagttggcagacaggtgacatttttaagaattctgccctagagctccccattgcattgacaccagctagtgaacaacaacacaaccctggggtgtgacaggcctttctgactgagagaaagaaagcccattttaaagcaatttcacatcctgtgggttgtgatgactttgagaacggatttcttttcttttctctctctcttttctttgacagggatcttacattgctgtcttccattatctaaggttctactatggcaatagtaaaacccataaactcccctagaatgagtttaacgtctctatgtccaacgtgaatgatcatcagttatacctggggaaatgaagcaagaaggaaagcagtgaatggggtacactggtcctcagccttgtccacaccaaagaattttctggttcaatggcatcatctctgttgaagatgtttatgtatacgaggaagatcaaagtcaaaccaaatttaagacaacacaaatggttaaagctcatcttgtttgtgtatcttctgggaaaaggtctctgagatggttaatctcagttgtcaacttgatggggtctagaatcaccacagaaaggcaaccaaggtatatgcttgagtgactatctacatgggtcaattgaggcaggaagacccacccaaagtgtaggtagcacttttccatgggactgggtcctaacttgaatacaaagaagagcaagctgagcaccaacaaccatcattctcctctgattccttattgcagatgcaatgtgacaagccatctacccattcctgccactgtgacttccctgccatgaaagactgtgtcatcttgaactataaatcaaaataaactctcctctcctcaagttgatttgatatcagagcaatgagaaaagtgactaacgtagcccaggctggcctggcactcactgtgaagccaagccaaggattactttcaactcctgatcctcttgtctccacctccacagagcttacaagaatgcaccactatagctgaaaagtcatatcataagttcagcagtctactgctgtatgtgtgtatttagaaacaccaagggaacagttaccatgaagtgttcacatatacaaagaactgtgtaatgcacaaataatctatctacataagttaagcaaattttgctattcacttgggaaaaatggaaagaattgtccatcaagaaaagctgcatgtttttacctgcagagcagagcagcatttgttcacagcaatgtttactgaagaagtgtgttctgagcactatcctaggctttagggaacatagcagtcctctgagtagctactgatactaaatgaaaatctgaaaaattaatggctcacaaaataacaatcaagggctagcgatgtagctagagtatagagttaagtattgggtgttgttcttaacactgggaggtggtatactgtaggggggaagggtccagctaaagaaacacaccctgagcagagccaaagaaacacactttggccctgcaaccagagccaaagaaatgcaccgtgacccaaaaagaaaaagaaaaattcaatctttcatgacaagttagcaaaaaatgtgagggttttttatcctcatccctatgtttggagcatggggaagctgacaataaacaaatcaagagagaaagaaagagagatacaggaactacacagtgataatggcatctatgaagtagaccatgggaatggaagagatgtagaggaaatcatgaatacaatcttttgtatgcagtggctgtagaagacttctctgattaggggccatttgagcagagtttgtggaggcaccaaacaaatgagccctggagataattaggagacagatcactgcagaacagcagggacacaggtcatgaggacagagagcactgcatgtggtcagggaatgacccaggaagccaatgtgtggtgcagaaacaaaagttcatttaagaaaaagccaaagatgttaagggccaatcctgcaagacttcaggccatgaagccaagacaaggacagaaagtttacaggaactgagattggaagccactggaaggatttttagtaggtcaacagcaaaattaacttgtgttttaataacacagggccagctaaacttccaggtgagatggaaggctagaggctatttctgtatgacccggtaaaaaacagtcaaatgccgtcaaatgagggagttcagttccctagcctttcccaaaggtaaggcagatgatagataaacagtccacaatcctcaggatatgcccattctcaggacatgcccacagtcctcataaatcccaaatacagtttggaaacattgtcattacactgacagccaactcaaaggcaaagagaaatcccatcttgtcaagctatatgactggagggggcagtcaccagcctactgttaaaagccgagctgtcccagggcctggaatcaaggaacaaccctgggaaagagaacctcagtttggcctgccacagccctttggtgagggaagcccagagagtcaagtgtggagaacagtgggactaatgctgaggagcagaaagatgtagaaatggtagaaggcagaagggtgtagagatggcaggagcagaagacatagagatgataggagcctgggctcaggctgggaactgcataagaagtgtgagtctgtggtatgttgacttaaaagttcttcagtgtatttcccagagtggaacagctggccgttatagtaactctattttcagctttgcaaggagcatccacatgattttatagtagctgcacaggatcacaccccatcaggggtaaataagggtttaccttccccacatcctccaaattaagacatatacaaaaagcaaaaatcgatgtccaaattacactagtttagaaaaattgagagcatttcctctaaaagatagaatgagataagggtgcccactctctccattcttattcagtgtagtgtttaaagtctttgttagagcaataaaaccaaaaaaaactttaaaaaggaaaggggatagaagtaagaaaggatggaagtagattatctgatccagagagatgactctcataggtaaaggggttttacacacaagcctggtgacttgagttcaatcctggcatttgaccgacatagacacaataataataataataataataataataataataataataataataataataatctaaatattaagaaagaattctttttaaaagagagaacaaattgtttattccagtttgcagatgtcataaccctatacttaaaagaccttgaagactccaccaaaaactcttacatcttttaaacactttcagaattcacaatacaaataaagtcaacacataaaatccatacttttgtttatgccaataatgaattcatagagaaggaaatcagggggaatcccttccacggtaaccttaaagaactaaaataacaaggaataggcctaattcaggaggtagaatactctgcaatggaatgtgtgagacactagagaacaaagctgaagaaaacaatcaaagatggaaagatctcctgtgctcacagaatagcaaaattaatattataaaaatgactctgttaccaaaagcaacccatagattcaatgcaatcaaaatcccagtggcattcctcacagagctagaaaaaaaatactaaacttcttatggatgcacaaaagacaatgcccctccccaccctacctcaccccaatccaccccactgcaaatagccaaagcaaccctgaacaaaaaaaaaaagagcaatatgggggcttcacactagtcagtctcaaattgtatcacagagccacagtggcagaaaccatggtcctgaataaaagcagacaagcagagcagaagaggctctcaagcccagactaaacccatacagttacaactacctaagttctgccaacaccgtcaacaacatgcttcaaagagaagagagcctctttaacaaatggcactgtgagaacggggcttgcaagtgtaaatggatggaactagatctataagtctcactccacacaaagatcagctcaaaacgcataagaggccttactgtagcactggaaactttgaaacttctggagacaaatgcaaagcaaacacctcaagagaaaacgtttctgaaatggactcttgtgcacagggaatagtcccaagaattgacaaatggcttagatgaagttaaaaggtttctgcaggctgggcctggaggcacacaccttaaataaattacagcactcagaagggagagagtggatgatctccacaagttcaagtctagattggtctacatagtgagctccaggacagccaagtctacatagagattctgttcaaaaacaaacaaacaaaattttctgctccaaagaggaagcaatcaccagtgtaaagatgggagacaaacctctctgggcatgtgtgtgagggtgttccagaaaagtttagctgaagtgggaccatccatccagaccatgggcggcaccattccatgtgctgaggtccaaagttgaataaatagataaagcaaatgccatgtccaaatctctcggtttcttgtctaggatgcaatgtgacagcagcctcacactgctgccactgcaccctccccaacatgaagcactgtgctctcagaccagaggcagacacccttcttccaggcatttgatttcaccaggtgttttgtcacagaaatggggaaagtgactaacacacataccgccatggattacctctgaaatgcttctgaacacttcttaacaacttcagtactttccctttctatgacctaatctggtccacattccaaaggtgaaatatgcagtcaaggcaattagtatgtcggtgggtagggggtgggtaccatttgatccaatgacatctataatgggggatgtcctctgtatgctgtgaatttatctttctcttattggttgtttcagccaatggacaggcaggatgtagccaaacaggaagtataggcaggagttccagactaggagaattccaggaaggggaacgcagacagtgagtcaccaggcagatgccaggtagctgccgatgaagaaagaggcctgggcatcaccagtaagccaaaaccacgtagagatacatagattaatagaaatgggtcaataattaagagagagctatccaacaagaagcctgagccatcagccaaacagtttataattaatataaatctctgtgtgtttatttgggtctaaacagctgcaggaccacgcagacaggaacatccatttacataactaggcaatgatgagtggatttccacttccctgtacagtcacatataacagaagtagctggactgaaactcatgggtcagaagtacaccacccctgtgaggtaaacagcttctttgaggacaagtgaatcaatctctcctcaggttggtactgagttcctaaaggagctcagtcctcctccatgtcagattgctttatttccttcaggttttacacatgcttgcccccgactgtacagtcagtacaggcagctcttcacagaatgtgagttctttccatgtagtgtttgctaagtggtggcacatataatcatttttatcatgtagagaaattccatgagggtctccctggactggccaaatccaaaaacacaagtctcctgtctatttctttatgccatgactgaaagtgagatgagccaattaaagaatacataataagccaattagttgttccttacttttcttaatgagtgtaaaatgtgtgtctgctcaaattacagctcatctgacaagattctttgctccgtgactactacgatttggcattgtttcatttttttaatatcaatggcatcagtcacaggagctgagcttctcctataagcttgtgcaagaaatgcactcatttttaaaaataatcactcaccccttgagcccaggtcctggctgtctttgcctctcttctgttgctgtgataacacactcttacaacagcaaattaaggggagtcttacttcacatctccaggtacagtacatcatggcacagacatcaaggcagcaggagcttgaagcagccagtcagttgcatccacaatcaggaagcagacaggaatgagaacatgctccgttcactttctccactttatatagttcagggtcccttgcccagggaatagtctaacccacagtttagatgggtcttcctgaatcagttaaagggatcaattaaatcctccagccacatgcccagagtttgccttaatctacataatccctcacaggtacactcagaggcccagctctcaggagatcctagattctgtcaagctgacagtgcactcatagccatcacaaagagtgtctacctgaatgctgcagcagcatgcctccacacaacacagctgagtccagcacatcctgaagatacgactctgctcggatgagtcaactgtcacctcagatggaagagctttgcaaaactcagttcccaagtttataacattattttggtgccatggtagattaattcatatattgtcattgggctttgtctacaaaagtcaagtgtaagcaatgagtaccacatggtaaaggagcacaattatagccatggataatgggggaaggggaacccttgagttactgtaagacagccagctgtgtatccaaaaggaacaacaagaaagaaaaaaagaatagagtcagaaaattttgtaactttgtcaacatttattttcaccaaacaactcattaaatcactataaaagtcaacgcatatggttggatatgacagtttaaattccagaaagagttataagtcaagttaaactcataatacataatatagtcagggtgtctcatccatgaattataacatttttattacgtcccaactgcaaattaccaacttgctccctgtcctgccaatctcttgattaaatgggggaactgttaggcactgtgaaaatatattatggtaaaagatgactccatcatttttctcagttatttctaagtccttatttaaagctttgtcactagagcagctggtccaaactgaactgtggatttaacaaaatgatagcagaatggatgaagtaagaagaaaaaaatgggtccaaaaggacctgtgtttattgtaaccttctccaatatttgtgtatcctcgatacttttggtatctgtttcaatctctttatttctgtctctttaaagttattcttactttgcaggtcttattcccatgagcctaccttaagggtattttattttgtgtcttacactgataatgggacaataacttatacccatcaagtttccccataaaacagtttaatgtcttgaaacagtgccaatacgtcagctaaagagagtgaatcaaatagacattattccacatttaccacgagccacactgtatcaggtccttcaagaacttactaaatcaccagtgtcctttaggaacttgaattctaaagttaatacatccattaatatttcaaaacatagactacatatatatatagattaaattcaataatttaccttttgtttatattttgtttcaatgtggtgtacttactttattctagagcaaacaaatacttaatcattacaggaaaacaattttaaataacaagaccctagccaggtggtagtgacacacacctttaattccaacactcaggaggcagaggcaggcagatctctgtgagtttgaggccagactggtctacaagagaagttccaggacagcctccaaagccagagagaaaaacaaaacaacaagaagaccctaaaagaaagctataatcacctccaataaaacataaacatacagaatgtaaacattatttctagttttcatgagtaattatgatttgctactcctattcttggcaaatgagataaagttactgtattagtagcagaaatgccatctttatccaggaacacaactgaatggatatgtctgattataaatttataaccaggtacaatcaaagacagaactagagatctatgaatcagaaagtcataggaaccatcatctaggtatggcattcatgaaagatgtgtaaacacaaacagcagaagtctagtgtttaaatagaagggaggaccagtaacatgtaaggcagatatgtctgacatgtagacaggaatgtctaataggcttttaataaaagcaatgaacagaaaccctctggatctccaggccatcccactactaaccctcaaacctttgttaaatcattgtgcagctcacgatgtcataaattagtgggacttagagaagggacattggatagtcacagattcagcaggaaatcatcattcagcaggtgcatccaaagggcctaagtgcagactggaaatcaaagcagagcctcactaggaactcagccaacaccgagtaccaaagcatgtcacttccctggatatccagaaatgatggggggggggatgctgaccttcacattggaatgaacactgacactaaattttgcttacataccaaagacaaatgaccctaagaaagctggaaatttcatagctggaatacaggctgcatgtctacaaagcacatacacacagagaaagagagaggaggggagggagacagggagagaggagagtgaaggctatgtgaaggaagattctaaagactgtatggtcactcagctgaatgaaactctgctattttgctaagctctcccaaggacagattatgtacttttcatgaagtgctagggactgaatttgaagtcaactgcttccaagtttcctatctgatcccatttaccagcttctgggacattccacctcctcgattccttcacccccatctttggagaatctgtggaactggtaacacataactgagggaagagtttggaagtccaggagagaatgtaactgacttgggataatttcattcacattattaccaagcagtgccctaacctacagccaaaagcgacctcaacaacacagcccccaattcacaagtgaaatcacagcagtgacatcaactgcaatctatagaccaagtgaggagagaccatcaggaatcccaagagctgagaacactaggtaacctcagctggacccaaggcaggaggaggaaaaagaaaaagaaagaaagggaggaaggaaggctggggttggggaagggggaagaaacccaatcaaacagagtgtctgggttccagatagtgacctaaagaagactcagggtacagaaatgaactggatttgagatttcgtttgctaggaaacagtgtggtgtcttgatgaggggctaccatgggaagaccgacattatcacagacagaccagcttttctctagctgggagatggaatgttgttagcatttttaacacagagaacacagagaaggttgccactgtaatccaagttcaaggtggtgagggatataaatgagtgggcccagcatatcttccacgtgaaattgactgtatttactaggcacctgagagcaatgacacaaaggaaggggaacttgagtaagtgcctgttcctattttattgtctaaaattccagggattaacaagattaataaatctcttagtggaggttagggggagacagggaatacatagagagctaagtgagacaaacagcttaactagaaaacaagtaaaccaaggattggcttcctgttgcttggaaaaacttgttacattctcagcatcttgaaacagcacaattgttaccctatgcttctgcaagtcagagtctgagatgagtttctcctgatgaagtgtcggtgtgttctttctggaagctcagggacaaccatcggcttttccacctataaccagtaaagagcacaagactatagagatcagttaggactgaactgggttgatcctaacagaaacttgaaaaataatgatttcaacatgaaggaatttttttctactcataccttttccaagggaggaaggtgaaggtctgcctcagtgcctcagttggtacccagccttttggagtccaccatcctcggcacataagcatctttcttcacatctagtcccgtgatcactaccagatggatgctgcttctctagcaccatccccacctccacatcctaggaagaaagaagaggactgggaaaaatgccaaaggggtctggggatgtggcttcgttgtagagtgcatgtctgacttgcacaaatctttggattcagtctccagcaccatataaaaccagtcttagtttcacatgcctatgatcctagcattcagaaggaagcaaaagatcagaagttcaaggtcatccttggcaacatagcaagtttcaggctttgaggccatcatacctcacataagactacatcaaaagaaaaagaaagaaagaaagaaagaaagaaagaaagaaagaaagaaagaaagaaaggaaggaaggaaggaaggaaggaaggaaggaaggaaggaaggaaggaagaaagaaatcccacatccttatgtgccaaggatggtgggctccaaaaggctgggtacccagctgaggcactgaggcagacctgcaccttcctcccttggaaaacgtatgagtagaaaaaaatcccttcatgtagaaaggaagaaagaaagaaagaaagaaacccatcataaattatataaggctctatccaaagacagacagacagacagagacagaggccagaggcctcatctgtccttttttggcaagctcttacaaagcctgactctacctcttttgtttacatccagggcctgcaaccttgacctgtggtgatgctgagctgtgggtgaaggtacttgggtctgagatggatcagccagctgacagagtctgtcagatctataaaaggatttcctccatggcaagagagagctttcaagtggaagtcaatcactgcttcaaatcaagcattgagaaagaaaaaaaggaggagagagagatttcccagtggaaaacacttttgtgatattagatattacttatgggataccaggaactatttcctagtgacatgggcatctattttatcctggagacttacaggtgttttcattgcaatcaaatggattgggatgccatgtgacttatagcaagaatatggtcaggacacctttttagaatattgggtttctaacttctttggggggggttcaagacagagtttctttgtgtagctttggagcctatcctggcactcgctctggagactaggctggcctcgaactcacagagatccccctgcctctgcctcccaagtgctgggattaaaggcatgcaccaccaacaccccacctctaacttcttataaccactttggagagcgttcctggaataatctagaggttccagtataagaatgagaaaagatagtcagttatgaaaaaatcataaaaagccagaggtagtggcccatgcctttaatcccagcactcgggaggcagaggcaggcagatctctgtgagtttgaggtcagcctgactacaaagtgagttccaggacaggctccaaagctacacagagaaatcctgtctccgaaaataaataaataaataaataaataaataaagatactgaaatattcccagaactgtgttaaccactgagaattgtttacgaatgccatctctcactcaaatgctaagcttaagccagtgttattcatggtgagtcaaattccagacatgacttccaaatggtaaatccaaaacaagggtagaagaaatctaaggatcttcgagagtcttcccatatgaggaaaagttatcatcccaaatattcaggaaatagtgaaagagaggttatgcaggtatgttgatgcgtgggagacatgaagctggacagatataggagacctgggaaaggggaacagtataaagaaatggacattatttatgaataaaactcttaaaacactgcattctacctgtgtagaaattattgaaaacagcattttttgggctgactgagcaagaatttattcagcaaatctcctgactcatgaaaacccaatcgtcaaattatttaacttgcttataactttacagagcaaaagttctctgcggacttaaggtggcacatcctggcttatgaatgtcccgccctgctctgcctgcagctacttctccctcccccttcatccagccaccttcctcctcccagtctacccccaaatcccaactcggccatttgtttgtccaggaacctgcattatgaccctgcagagctcatgggtacttgcccagaatgaatatattcaagtggctccctccaatactcctcttgtcaagagacacgtaatttatgaaaaggaatttttcagagctttagatatagtctgtgccgtattcaatttaattcagtaaatatttattgagtgtccacctagaattgtgctatgtcctatgtggaaaataaaagaaatatataacacaggctctggccaaagggtcggcaatgttcttgggaataaaagctgaatgctgatatgattacaggatgcaaaacagcacagagcaaagcaatagaattatgtaaccagaaccaaaatatgagggagagtcaacattacatttggcaagaccaagaaggatagagccacagggaataatttatgggggagatggaacttgagactatccctgagagatatgtgggttgggccggatgctgcagccaacaagggcacttctggccgtggaaagaatgtgagtgaaatcagagagcgggcaaagtaatcgtgatatgttatgaagaaatgtgagaagccactctggatggagagaatacataatgaccacagaaagactggaagctgtaatctccccatatccttgcttggtgttctatcattgtcggagaattcaatcactgggagccagcatgagatgtggagaacatgggctctctctcagttgcttttctcacagctttgacaaaaccccagcacttcgaagaagagatgatttctctccactcctagttgaaggtgcagtcctccatgacagggaaggaacagcaagcagtgctggaggtggctggtcccgtcatatgcagtcgggaatcagacagcatgcatgttggccctcagcacaactttctcctctgtattaggtctggtactccaacctatggaatgagtccacacaaatggtgagtcttctcggctcagttaaccctttctggaagcactcacatagacttaccagatggtgtgtacccatggtgattctaagtcccatcaagatcataacagacttgaagtgtgttgctggaggttctcttgtcccaccaggtcccgccaccgattcagctccaaataagcacacaaaacttctattaattattaaactgttgaccagtagctagggcttctaattggctagctctgtcttaattattaacccatttctattattaacccatctctatactggagaagggtctggagctgttactcctttttggtctacatcgagtctctctctgcctccatttcccagaatttctctcgtctcctagtcctgcctatcttcctgcctctatggccaaacagtgttttattcatcaaccaataagagaagcatatatgcataaggatacaccccatcagaagtgagaaagcacgattcttcctcctgtcctacctcagcagaaccttgttgcttaggcatctccttcacagatgttcaaaaaaaaggagggagaaccgatgttgacaatttaggactgctatgaaaatcagagttctaaacaggatgtgctttgtgcctacaaataggtagaatcctttgccagtcttgttcattatttgttgaatctctactatgggttaaaaaacaacagcaacggggttcagcactaagaaaatgaaaccaaaaatatgcagtgtttcctccaaagacatcagcaggtatatcttaaaacaagcaacaagtcagtgacatggctcagcaggtcaaggtgtttaccatccagcctgatgttctgagattgatctctgggacccactaaaagttgaaggaaagaaaggactactgcaagttgtcctctgatgtccacacaaatggtggggcactcaaacactaattaattaatttcaaatttaaaaaaaagcaatgttttggagttacaaatacttaaaactgaagcttgttcccaccaattacaagttgcatcactttgggggaacaagtaattctgtatctcagtttcatcaattgtgtcactggtttggcaacattgacctttagtctagtttgaagattcaataccactctatcaagaaaccaacatggtacctgacacctggaagctttcaataagtgttgtttgaattatagtgggcagtggacagaaaacatagtctgataagaaagagcaaatcactgggagtcagaggaatttgtgcactgaggcaaacatggactagaattttttgaagtaggcacaaattggaatattcgtagaagagggaacaatgtgaaaaggtacagaaatatgaaagaaatggtatgctctatagcatgcaggtaatttggtattgctggactataaagttcaaggcagagagcccaggagatgaaagtgaccaaattatgaagacttgcaaagccaaaggaaggtgttggaaaacacccatcaggcaatggggtatcactgataaacattgagtggtggagtaagtgaggcagctgtggagattgaaaattcccctatggtaaggagacaggaagcatttagggaaacactgaaaacactcacatggcacagggagacagagaaggtggaatgatccctggagacctttaaaagttgattgcaacagaattcggttttgactgatgccagaaaaggttgactgtttttaaagaatgcctcttctctccttgcagtgcacttgctgagactgagaacacagatgtaaaacaagtttggagtaaggatgatgcctcctgcttaggatatgatgaattaactagaggtgtctgtggcctatcgaaatggagaacaaacgtggttcagcaacacacttggagaactgggaagtctgaagaggtggacttgggaggcattggcctatatggatgaagactggtcataagaatggatccatccaggataaaggagaagatgagacaactctcaagtcatgtcattccttactggcccaagaatattaaactcaaactctttaaataaaaacacaaatctcagattcagagaatgtttaaatatgcccaaggtcaaagaaacacattttctggcgagtcttttctctccatggtagaagctggatgtgtgtgaaagaaatgagagggaccacatagagagcagatcttggatactgaggggctacacagaggatgacaattataaacacactgtctctaggaaaacagttcatttacaaagtagatttgacagctcaagttgcttcttggcggagcagtcttgcctgccccccacgcgacctggtgagcttcgattatagcctcgatgctggtgcaaccgcagagaccccctaaaaggggagtgatgaatgaggtcctgtcaggcttcattccctgggtggccttgaatctctgctgttatctgttaccctgccagtgctgacagtgatgaacacaaggcaggcagctaacgacaccccgattcattacccagaaagaagagagagcagaaataaagagtaggtgaccaccatgcaaaagcttcccacatcagtgctgtcttcctcctgcagctttgaatggagaagaagtgatggagcccctttgtctcatgcaaggactccaatgatactcagaatagagttctcaatgaagccaactgggaaggccaaataccagcctcagctgggtaaagttcttcacaagacttatgaatacaagagatatttagcaacattttaaactcactattattgtagcaaaaccaaaaatgaaaggcacataaaaatcatcaacctgtacagccttcccaacctaaattgttatttattttaggggagtgcactgtctctccctaagactgtattagatttatggcaccacactagcaaatggttaaataggcttagccattgcttccaattataggcattttgttgttaaagtggtatttggttcttccctaaaaagatcaagatttttgtttcaacacattttttttctaactagtaaagaatgaaggcttctacttcattgtctcttttttcttattaatgggacttctcatgatgcctaaagacatgaaacatgtccaacaaatgcatcttgaatttaatgcccaaaaaagacaagtttgtctgcctaatccaatccatcttaacccagaatgtcaatcagagaactggttcttcaaggcatcaagaatttatcactctctgtctctctgtctctctctgtgtctctctctctgtctctctctctgtctctctctgtctctctctctctgtctctctctctctctctctctctctctctctctctctctctctctctcctgtctgtctctatttgtatgtgtctgagtacactcgtctttgtctacatctgtgtctatacatgaaggcaggactttgtggtgtatatagctaagcaagggcttcctccaggaacatgtttttaacagaaagaaagttccacagtcaaatggatttgaagaaacctgtgttaatcaagtctagcaggtacctttcacaccatattttctgggaatctttaacatactaatgtacattttgatgttcctaaagcaaatataatccatgatattttaaatctgttttcttgttacacacaatacctttgtgcaatatgtatttatcctgctgttacaaaaaaccccacaatttgggaacaggtagtctggatgaatcccacattctcattcgcttattgcagcaataaaatcaggtgatcaccaagatatggtctaagtatgtggcagaccaagacagtctgagggtacaatgagtgctaaagaaaacaggggtggagtggggctgaagatgtgcctcagtgagtattgtgcttgcctattatgtaggaagacctgagttcaatcctcagtaccacataaaaccagaggtgatatgtgtgcctgtcatcttaccacttgggcggtagaagaaaaaggaaaataagctcaggggtcacctccactacatagctggttcaaggacaacctcagctacctaaacagggtgtgggaaacaagaaagagtaacataagagagccaagagagtaaaagtgcttgcttgcaaaacttgccctccaacctccaaacctgctcctgcctatgcacaagtttgaacacacacactctcgaacatacatatacacacaccatacataaatatatacatacacacaaataataataaataaacattttaaaaggggagaacagagggaggaagaggaagcaggattatatactatgaacaagatacattatttatacacatgtgttaaaatgtccaagaattaattcctttaaaattaataaaaacatggtgttagctcccaaagaatgcaaaaagagagcctacagacatcctttcatacattctgacttctgccgctatttgcagtgttctttgttgaaaagaaagcagcgggagttaaagacgatactgaaggaagaaaggtagttttcttagatttgggaaaagggcagcggaggtagtaaatacatggatttttatccttgcttcttgctgaaggccaaattgctgttctaagaacagtagcacaagacatcactatttctttgagagagtgttctgaattttccttttacatacgtatgaatggaagttggtcagacgttcagaacacttaaaaactactgagtaattttcttaagtgcctaatgcaagagtgagcacaaaaggataattcgctccagtgccctaagacatgcaagcaccgtacgtttcctgttatgtaagaggagggcacatcagtggccttttctgtctcagctatttggcatttcctattaaaacaagtcactagctacattcaaaatagctgaagaaaggtgatccaaaaacctagacttgagctgaacaagaagagatgagaaccatctacctttctctatcagcattaattgcttaagctgcaaagcaagagaaaacgttggacaaattaaaaccataccaaaattccaacactttaagtagggtgtttaagtcaaaagcagtgtggaactgcaaaaaaaaaaaaaatggtaatgtagatgtgaactttctgcctcttcctcgtcaacaagcaaatggtgttcaggtgggaagaactgaccatctaagaactaacctaatatctgaacgagatacaaccatcgtcatgaattaggaaaggacattaatattgtcctgctgtcttctcaataggaagtcagccctggaaagaaaaatctcaccagtattttctttctgtgtgctccaagaaatcaaagtcagtcgtggtgcttccaaatgaagtgcaaagaaacctgcatccatttttccctctcattgccaatggcaggttattcagctctggcggcgtcaaagaatttagcagagggaggagaaatataattctgtggcttctggcagaatgaagtttatccttccacagattctgtaataagttctttctttcctacttcccacgaccaaattgtgtctcctactttttctgcaaaggcgctcatttctgactaacaaatacgaatgattccattgcttggccatctattggtgacaaatacactccttcatttctcaggcccctgagagctcgaggattgatgggcatgagggaagagctgggaccaagaattcaaggaagagattcgtgttattggtcttttattcaagttaatcacaggggaatagtattttaagacttcatggacatgcccaaaatttctccagagacacagatcaatagatcagaataatcaagaaaagccaacaagtcttctaaacactacttgagtgttttacttgagtaagcaaaaggcaaatggaattatcccaacctcgtgaagtaagggagaaatcagatctctggggaagtgcctccagtttggagctgaaaataaaacagaaggtgacattttaattccagtctccggcctggacacagggatgtgggcggcacttgtttgtaacatgatttagttaatgaactgcttccccaaataccaccgaattccctgtccgttcacgataatacactctatgtgagggtacagggtctgatgcttttgcagatagcctctctcttcactttccactcaaactcagtgaaaatgaaggcagcctgattgctctgagggcatgttgggccccagtgatgcttaagtattagcctgggaactctgagccttcctctcatcagcaaactagagatagatacctgccacggtgtcctgaatgagaataaaatttcaaaatcgttcatgtgaagcctacgtcaatttcagtaaatgaatcacacgaggtaggatatgagtaatgaatgaactttgagtgcccagcaacgttttccaaaatggctcttttgcgatgttaatgataaggcagaacgctggggctcctgtttgggatgcaccgccccttcaacagtcttgtctgccctgacagctcctttggagctcgcgttctttcacagaactgtcttcggcttcatgtgctcctctagccttttcaccctcttcctccgctatccactcatctcttcctcgattcctctttgttcctctcaaccgccctccagccccttttcttctctgataaggcagccacttatgcatccccggatacttctaggatagggagcccctgaagctgcccaagaaaaacaaaacaagcccccacccccgctccagaaagtgtacaaatccgagctggaacaaagtgattctttaactcacattcaaaagaattttcctcagcccacgctgcgtgtgctgtattgttaacttgtatcaaaggggttcatatctcaggaatcacaggaaactttcaaacatgattgatggctagtcaaaagaacatccttggcgcgataagccgcggagagggaatgtgctgagccggttcaggatcggcctggctgtgcctttcaaattcctttcatcgcaatggcgaccataagctctgcagggtgagaacaagccgggactttttgtggaattttcctaaccgctgatatgtaatccatacagccagaggtagcagcgagaggataaaagatttaaagaaaatggagacacatggactgattttatttttttttaagcaacttggaaagaaaaaagggggggtgagaacagcaaggtttatgttaacccattgggagtgcattggaatttctttgatgaaggattgagattgctttaaagcactttattgaagcaaaatgtaagtatagtgaccagaactcagggtgactgggtcactcatctgcttctccctcacccaaattctgcaggctaccaaattgttaaaatgctgcactagattttccttttgaataggaagctgtataattagtagaaactctccctcttcctcttcctccctctctctctctctctctctctctctctctctctctcctcttcctctctcttctctctctttctctccttttctccctcttctccgtgtgtgtgtgtgtgtgtgtgtgtgtgtgtgtgtgtgtgtgtgtgtgtgtagtcaagctaccgatgtgaagatacagagtatcttaaggatacagaacttaaaagagacagttcttacttcccattgtgtagactcctgaatagagcttgggtcatcaggttgggtggcaaacacccttaccctctgactgatcccattgaccaagaggaagggggcatgtgcacatatatgcccaatgaaacatgaaaatggttgctaaaatatcaataccctattaaacacatccttccttgccatgaatcagatttaaagtggcatttcaaaagctggaacaaagcagatgacatctatgaaaagacaaagcaatgtttgttagtttccactgcaaagagactcaaatatgtcttaggaagcaagaagacagtcttagctggggaggagagaacaaaaaatttgcctggaattgagagtctaaagcttcccttacacagttcaggtatcatgaaagagcttgaacaaaaaataaagtttaataaaatggaggccagaaagacagctcaatggttaagagaactggctgctcatccagaggacccagaatcgattcccagcatccacagggtggctcacaaccatctgtaactccagtcccagggaatctgatgccctcctctggcctctgaggaaacttcacacactgggtgcatctatacacatacatgtgggcaaaacatccaaacaaataaataaataaatgtagcagttggtcgcccacatcctgattatgctttcatgttctacctcccctttattgcacacaaagttaacaggtatatgtgcacaaacaaaagtaaatacataaaattttagaattagatcagagaaccctaccatcatctgtcactgcggccgcaattagggtgtgcttataattatgcttttccatccatgttggctgtgaccataaagtaataacgatgattttaaaaaaaatactgctcatttatttaaacagtgctggttttcaaagatagtcatgcagctgctcttagattttgatgtctttgaggcttgtgttttgcatctgaaagcagtaccaagggaagaccccccccctccccaagtggttcaaacaatcacacagcagtgttgtatggcatcacagaagttagcttttacctcccagggaacattttggaaggatgatgttaattggggagtgtggagttcaagagcagtaattcagaaatcaatcatccttccccccagtgaagctgggacactgatggagcagcagagctggcccctgctgtgaactgaaacactctctccagagggatggaagaggttctagaacctcacagggacaggaaaaactgaaacccacagattctcaagacctctcccaaggccttaaaagcaaaaaacagtaaacaactgtcaacaagagaggagtctccaagggagactgtcctgcaggagactgtcatcagtcaagttgcctacacatcatggcggggctaactctaggaattcaactttggtgagttatcacccatgctgccatgctggtgtaggcttcccagtgagttagctgctggtctaagacgtcaaacccaggttgtcagactcggtgacaagcctttctacatgccaaggcatctctctggccctgaagctgccttttaggaagtaattcctctgcccatactcctccaaataaccccagtgagctcactggttccacaaactgaacttgggtagaattctgagcttgatgtgttcctttggtttgttcaaatctaggcagagaaagttcacagaacaatccctcactgccctcaggagcacatgctaagaaatgtatcagtctggtgcaactcactaatggagaattctcagtaagaaatacaaaggcaagtgcagtggacattccagaccaccaacactcctgaaaacaactagttaagtcattgtattaacatttgtcctgataaagaaatataaatatagtatatgcttgatgttagcaaacagacacctaccttaacacatcacagactttatgctaacagcctaggtggtttcttcagggaaatcaataatgctaaacttggcaatgatgacacccactgtctccacagaacagagactagtttaagaggacacaaagaaacttcagtaccctaaatgaataactgtctttccaaagacgactctttctttgcttctgtaaggaagctggctggggcagaaccataaacaggcatcaaagcagccagcaacatcagtgtcacaatgaggaattccagcttgtcctatagcatatgggccagttccctatgttttattacaagcctttaccatttgctggaaatcctcagagatggctgctcccgtgactttttttaaaatggcattttttattgtttctgtgggaaaacaaatatagtttccccataaaccatgaggaagggttgtttttttttcctacttgccagcttctagaaaatcagtcaattaccttaacctttttcaaaaacagaaaggaacttagcataaaatgttgaacttctgctctcagagaaaacccataatccaaagtaagtagacagttcgtgaatgagatgagctacagcatgatccaaggtccaagtgggggacgtccttgaggccatcacaggatagactcggaaatatcacatgtgccttcagagcagtgggtgagtcatcagatcctggaaaaggcatgggatcagcaccagggataggctgattctctgtcagagctggccaacttctcggataaactaacatggtgcttgcacttcggcctcaactggtgtgctaatgccctgagaagggaaaaggggtggggtgaactgacatttgttgagcttctatcctgtgctaaagactttctgtcacaatggtccactgtgagaagaatcgttgcctccttttctatgcatgaatcaactggagactcagatgttaagtcatttatccatagccagagaacgtgcaagtgcccacacaagattcagaccctgacctctttagtgtctacagctagatggtgtgtgtgtgtgtgtgtgtgtgtgtgttcatgtttgggcaggggtgtgtgtgtgtgtgtgtgtgtgtgtgtgtgtgtgtgtgtgccttggccaccctctgctgccattactcatgtgccatacactttgtcctctgagacagtctctggctggcctagaacccactaagtaggtttggccggctagccagcaagccctgggaatcctccctcttctctgcctcccagcactgagatttcaggtgcctgccaaccaactcgtttttctaacacgggtcaaactgcaatcttcatgcttataaggcaagctccttaccaactgagctatcatcccaggtcctgaaagctaaatgcttttaacacccctaagctgagtatgagagacagacggcttccaaggtggtctgtctgtgctctgcactcgcttaatgtacgctatgaaaattcaattgtcataatcagaatgagactcaagagatgcactgctattgggttcctttgtgtgaaagttcattgaaatgtattgaaacacggaaagaacctatcacgtgatataccttgtgttgatacaagcatggaatcatcaaaactgttcttccccatctgtctcctcgacaccctgcccccaccaagaccacttactaacaaccccacaacaatgatcaagtatttactctataagaacaagtgctggtcctcagatgggatgtggcatttaaacaggtgaaaactatctaagagtgtgaacccggtaacgatagggcagtgtccatctcctgacttccagctcccctctctgctgtttgactcactttccacagccttccactagaaagctatatagcagccatttttcagtgtcaggcactcattaaataaaacataaactctatactccatgtggctccgaagaaaacacagtgtgcaaacagcactcagaggcccttgttctcaattctgtttctcccatcagcagcctggttcagaaccccataactcgtccctcccacgagtgacatggctgcagagtgagttttttagagaaatagataacaacatcccttgaaagaaacaagggaggcatttcagcaaacagggtccatagtactgtggctgtcagacccacacgccacctctcaggacttgtcttcctctggcgttgctccaactatgctgcttgaggtctgtgatagacaacggttctccagcacttctcaggtagacgatgcccaggatcttctctgcacttgattcatgaagaactggaagggtagcagtactaaaggactttcccctcggttaataaaagaatttgagattgcatggaaaagctcagctgattgcagaggctctgggctgtaatgagacttgtgaggtttctctgcctttaggccaggcctttcctaaacaacctggctgagactataacctattttaaggtcctcttaggaaaagtttttaactcttttctcctgcacaggaatagagagaggtatggagggcaatccatttccatctccaatcaggatgtgtgtgatacagcatagctggtcaacaaaactacattccacggcaatagctaaactagtctcttagaccattcgtaatgaaagtgcttttctgtaaatcacctatttatgagacctgaactaagcaaatccagccaatcatttccttcatcaggatcataccatggctcctttatatcataagccatctcacgtaggaagatgggagaaagaaacccaaacttaatatagtctgtggctcattccctcacttcctccaggactgtatagaaatgtcattccctcatgaaaccttccattataaccccaatcaaaatgacagcacacacaagcacgcacgcacgcacatgcacatgcacacttatacacacatgcacacatacacactcatacacacacacttgtacatacttgctcacacacaaggtcatacaaacacacactcacacatacatgctcatatacacacatgcacatgcatgcacatacaaacacactcatacatgctcacacacacacaagctctctctctctctctctctctctctctctctctctctgtctctctctttctctctctctagggttttgtagtatagcttgggtaggtgatgccatcagaagctcctcccaggctgaacttctttaatttttcttttctctgagtacttaccattgtaaaatggttttgttgtctattttcccaacaaactgtaacctccatgaaagaaaatgctttggtcctcttttttttttattttgtattcctatctattaaaacataacctgatacacatcaggtacttatacatgactgttgggaggaccaaatgaacacacagcttcgtgcaaggtatggagcctcatgttagctaataaatgattgctattccccggcaggatgtacactgatgaatatgcaacaggtattcccatttagagtatcagttctccatctctttaaaagtctggagtgtccagcactcaggaaacagaggcaggtggatccctgtgagttcaagaccagccttgactaaaaagggaagtccagaacagctagagctattacatagagaaatcctgtctcaaaaaaaaaaaaaaaaaaaaaaaaaaagaggagagtctggaatgtaatccttggagtctgggtgctagactgagatgcaccttctctcaaccccaaagtgaggcaaaaagacagggcgtctggcttcctgctttgggcttcagccaaaccatccctttccttctctctcttatgcattcaggttactaagaaagaaattgtttcactgataaaagcatagatactccagccagaccttgaggttgaaaacagtgaaagaaaatagggtgaagtgtaagtgaacacgggctccattcattccataagtacttatagggcattcattgtgtgtctgctcatgccagtcactgggaaggcatagggaagcacaccatggccaaacccaaaatcaccaacttcccagtaataattataataaccttgggaaatgtatgaaatctgagcaaactgaagaagagtgtgtccttccagaagcgccactgagtcttgaggactatgggttagatgaagcctcgggagactaaccttcacttgatggtttaaaataataccgtggcttcttgggactctgccctcaataataaaatatgacacttgaaagtcaactgatttgtgaagtccctcccaaatgccacactgaatccagattcattgacttaacctgcactgtggtttgtcatctaccactccaaaattcatgctgaactttaattgccttgttaaagggatcagttagatggggctttaagagttgatgaaagtcctgtggtctctgcctttatgtgtggaatgaagactgttatccagaaacaaactcagcttctctctctctctctctctctctctctctctctctctctctcccccacgcttcttcattgccagcaagtgttcctcctctcaggtgccagcatcatccaaggtactatcagaaggtggagcctttgcctttacaaaacactaaatctaccactgcctgccttgatcttgaacttcccttcccagcctccagagccattagaaatcagtatctgtccacaaattatcctgcctcgtgcatctgttacaggagtacaaaatagacaaagacctcttacagacaggtgaaaccagcagtttcaagtaatgaattgctgaataaggatgctcggtccattcatctgaccgttaacgttgtatatggcacagtgatcgtcagtaggctctaaggaaaagtcatttgaattgattggtgttctcttccacatatgagagatttttgttgcattgtccaaattcaacttcaagagttccattatagctatggttgatatcagaagcaaggtaatcttgaaataagttgtggatttcaagctttattgctcatcattgccatcatgtttgctttgcattgaaaacaaatctccacatttaacatattgaagaagaaaacaggatgcttagttctggcaaatttggaaccaggacagatttcaagacattttcctcctccatgctttcaaatcataactaacatgtcagccagaaatttgttcgctgtcatcagctactgaagcatcagaagttaacagtgtagcacaatgacagtgagggggatcctgaaggcttgcagaactcctgtgtggagcttttaagttatatgtaattttcattgtactcaaggtgcctaagaatttagtttctgcccagagaggttaaaggaaatgacatcggggggctacagagatggatcagagatcaaaagcactttctcttgttgaggaagaaggttcagttcacagaacccacctgactactcggttctgtaactccagctccaggggatctgatgccctcttctggcctccatgagcattgcaagcattggtacacaacaagcatatacacacatacaattttttcaatttaaagaaaatgactttacataaaaaaagaatcaagttatagaaatacttctgaaactggttactgaaaggtccttcattttaagaggaaacaaggaggaaagcataaatagatatgcttcaagtatgtcatgtgctctggtttgggtttttgtcattctgtgggatagattctctgggcttttggatagatggcagaagtgcttagatttattaagtgatggcagcaatacctagaggaatggagacaggataggtcttaggatctggtcagtgagccatcaaaatgaggcagagccacacgacttattatctagcattaggaaaaagtaaactactaattcatgctataatatggtgaaaaacatatccttagcaaaagatgccagtcacaaaaggccagacatcaatcagttacattttattaaaggcccagtaaaagcaagtctatagagatagatggtgtattcagcattatccagggcagagagaagctaatgaatatgagaggtgagatgacgaaaatgtaaaagtaggtattggttgtagtaatggttttttgtgaccatgaatgaaccagaatccacttgctaagtaccaaacgtttgtgcctcaaagtttgaatattgaagtcctaacctcagtgggatgctactcagaggtaggaatttcaagagactgtagatgaagacgaggttcccacaagacgatgactgtccttttaagtaaaggaagcgatgaggactcccatcccgctgtgagggcatactgcaagaaggctgccacccaaaagcctgaattgtgccctcactaagatcccaggctcatctgggcctactggtgcaggactgtaatctcagctaccaagaaactgaggcaggaggacccaagttcaaggcctgtctgggctatgaagtaaggtgaaagctagcctgggcaactcagtgacaccctatcttgaaataaaaatgtaaaaagcactgtgatctaaaaagcttgatggtagagcacttagggaataggctaacagctctggcttctacagccaatgatgaaaaagacaaaagaggggggaaaggaaagaaagaagggagagagggaggaagggagggagggaaggagaaagggaaaaagggagggacagagagggggaaagagggaggaagggaggaagggagggagggaggaaggaaggaaggaaggaaggaaggaaggaaggaaggaaggaagatacaaagaaccatatctgtcagcaccatgacctttgaaaaataaatatctacaacttctagtcctgagtctacggtacttaactatgacaatctaacctgacccaaataccaccgagctggacatttttaaatagatgaaatatatggtatgtgatttatatcctgagaaagctataattatagtactaaaaaatactgctgctactacctatcagatttgttgtaaagataacactggagaagggggatttggcttatctttgtcacatgctcttacagcactgttgccttgttaatcccaaggctctgtatcatagcagtttcattttcaaggaagtagacaaaataatgttgaaggaaaaaaaacacataatgcttatgaaagttcccatttaaaaaaaaatcctatatgatatcagccatgtaattatgtttaagttctcctcaaacaaggcattttctttcttttttttttttaggaattttaataatttttttattaaattattaatattttcacatgtactttccnnnnnnnnnnnnnnnnnnnnnnnnnnnnnnnnnnnnnnnnnnnnnnnnnnnnnnnnnnnnnnnnnnnnnnnnnnnnnnnnnnnnnnnnnnnnnnnnnnnnnnnnnnnnnnnnnnnnnnnnnnnnnnnnnnnnnnnnnnnnnnnnnnnnnnnnnnnnnnnnnnnnnnnnnnnnnnnnnnnnnnnnnnnnnnnnnnnnnnnnnnnnnnnnnnnnnnnnnnnnnnnnnnnnnnnnnnnnnnnnnnnnnnnnnnnnnnnnnnnnnnnnnnnnnnnnnnnnnnnnnnnnnnnnnnnnnnnnnnnnnnnnnnnnnnnnnnnnnnnnnnnnnnnnnnnnnnnnnnnnnnnnnnnnnnnnnnnnnnnnnnnnnnnnnnnnnnnnnnnnnnnnnnnnnnnnnnnnnnnnnnnnnnnnnnnnnnnnnnnnnnnnnnnnnnnnnnnnnnnnnnnnnnnnnnnnnnnnnnnnnnnnnnnnnnnnnnnnnnnnnnnnnnnnnnnnnnnnnnnnnnnnnnnnnnnnnnnnnnnnnnnnnnnnnnnnnnnnnnnnnnnnnnnnnnnnnnnnnnnnnnnnnnnnnnnnnnnnnnnnnnnnnnnnnnnnnnnnnnnnnnnnnnnnnnnnnnnnnnnnnnnnnnnnnnnnnnnnnnnnnnnnnnnnnnnnnnnnnnnnnnnnnnnnnnnnnnnnnnnnnnnnnnnnnnnnnnnnnnnnnnnnnnnnnnnnnnnnnnnnnnnnnnnnnnnnnnnnnnnnnnnnnnnnnnnnnnnnnnnnnnnnnnnnnnnnnnnnnnnnnnnnnnnnnnnnnnnnnnnnnnnnnnnnnnnnnnnnnnnnnnnnnnnnnnnnnnnnnnnnnnnnnnnnnnnnnnnnnnnnnnnnnnnnnnnnnnnnnnnnnnnnnnnnnnnnnnnnnnnnnnnnnnnnnnnnnnnnnnnnnnnnnnnnnnnnnnnnnnnnnnnnnnnnnnnnnnnnnnnnnnnnnnnnnnnnnnnnnnnnnnnnnnnnnnnnnnnnnnnnnnnnnnnnnnnnnnnnnnnnnnnnnnnnnnnnnnnnnnnnnnnnnnnnnnnnnnnnnnnnnnnnnnnnnnnnnnnnnnnnnnnnnnnnnnnnnnnnnnnnnnnnnnnnnnnnnnnnnnnnnnnnnnnnnnnnnnnnnnnnnnnnnnnnnnnnnnnnnnnnnnnnnnnnnnnnnnnnnnnnnnnnnnnnnnnnnnnnnnnnnnnnnnnnnnnnnnnnnnnnnnnnnnnnnnnnnnnnnnnnnnnnnnnnnnnnnnnnnnnnnnnnnnnnnnnnnnnnnnnnnnnnnnnnnnnnnnnnnttccaggttctggctattacaaacaatgctgctatgaacatggttgaacatatgtccttgttgtatggacaagcagtatttgggtatatacccaagagaggaatggctggatcttgaggtagattgattcccatttttctgagcaaccgccatactgctttccaaagtggtcttacatgttcacactcccaccagcaatggaggagtgttccttcttctccgcatcctctccagcataggttgtcattggtatttttgattttagccattctgacaggtgtgaggtggtatctcagagttgttttgagttgcatttctctgatggccaaggattttgagcactttcttaagtgtctttcagccatttcagattcctctgttgaaaaatctctgtttagttctgcaccccactttttaatttcattgtatggtgttttggtggctagcttcttgagctccttgtatattttggaaatcagtctgtcagatgtggggctggtgaagattttttcccattctgtgggtggtcgttttgtcttactgactgtgtcctttgccttacagaagcttctcagtttcaggaggtcccatttattgattgcagacctcagtgtctgtgcttctggcatgatgttcaggaatcgttctcctgtgccaatttgttcaagggttgttcaaacaaggcattttcaatgccaccttataaatccaaaaagatccaagaccttaagaaagtcgtcaaaacaagagtttgtcatcacgcaatggtcgctttcagttgtcctgtgtgacaaatatagagtgttccacgggggaccgtgcacctcagggctcccagtctccctagaactccttctccatctccatggcaggagtcacttgagccagacctctaactaactcccagtttgatacgttggtctaaaaacattctactaaagcaagcatttcccaagatttgttttggaaataggagataacagtgtaaggagtcatggccaggcatacatgaggagggaaagtcccggacaacaaatgtaatgttgatcccattctgaggtccttgtttccctggcactggggcatatctcagtgaacatgctgtcttgtgtttcacctaacaactgctgttagaatgttagtgacagatgagaaagccattcaatcaagactgtcaaatgtctaactagatggagttgaaaaacaaaggaagggaacggaactgctaaatataacgcattcagacatcaaatcattgcaccttctttgttaaagtggaatgcgcagataaagggttctctgtgattctccactgataactccatcaggacccctcattgactgctggttttcaactctatgtagagctgatgaagctgacatccagcatctgcaccagctcactgcagaccgaaggaaggactctggctttctaaaattaaaaaaggaaacatcatttgatttcctgaaaacttttaaaaggctcttctgcaaaaaacagctagataaatctgaagtctaaaaagcaaactgggaagctgaacaggtgcctttggtcccatcagtcagttgcaaaggtagatagatctctgagttcaagcacaacccactctggtctactgagtgagtgtcaggccaggctatgtggtgaaactctgtcaagaaaaaaagagcagagggcaaaagagtaaaatgtttgcaccaagaaaatattttaaaagtcttttaaactaatatgaaaagatgatccaacaagaaaataagctaagggctgagcatggtggctcatacctgtgattccggcactcaagaaggtttaagttcaaggccagcctgggatacctaatgagttccaggatagaattacatagtaagactttatctcaaaaaacaaaaaataaagataaaacaattttataattcattgaaaaatgaatacaaatagccaaaaaagactgacagtaagattacccatagtaataatcagagaaatacaaataaaatcactagttatgtttttcaccagacaagaagttgacatttgaaaatgccatgcaccaaggtttttgagagtcatcagtgatggctgagagcattacaacattcactcctcaccacctgttcaaacaaacactgttctatctgaccagcgtttctatgactctaaacacctactcatttagaaaagctacagcatacacaagtgtttgttgcaatattatataaaacggggattattaaatacaacactagctattcaagaggtgagatattatatagtaaataaaaggaatgaatgctcattgtatattgcatgattttgttcaaatttacaacattaagtgcaacataagacttcatgttagaaaacaatagcatacattttataaaatgaatgtatatatgtatgctagcacaaagaaatcaatcatttgggataatataaaccaaacttagagtgtgaataccgttgaaaactaggtcagcgaaagagcaagatttagataaaataccagatatgatgattcacacctacaatcccagtacttcggagactgagacagaaggataaccagttcaaggccagttggggacacttggtgagactctgtctcaaaatctaaaagagatttagatggagttgaaggggatttgcaatcttcctgaaatataaaatatttcagtttttggaaaaaacatagagctttcattacatttaatgtaaagataatgactatagctaaggactatattatattcttaaagaatgagagtagatgttaaatgtcctcaccaacaaagccggtggctatatgacatgatagacacaacccctccacaaatcatacatgcttcaaaatgccatgttcttcaagataaatgcatacatgtaactgtacaagtccatttttaaaatagaaaaatacttaaatgttttaaacagagtatgtgttcaacagaattgccttcccaaatgttcgagtggactgggtgcatagttcagtggtagaggacttgcttatcatgcacacagtcctaggttcaactcccagcaccagagggggtaatgaatgctgggtcatgtgtatatttggttatttttgtataaacatatttgtggatataagtgtgttttccaaatcctgcaaaagtgactgttacagcttgttattaacagtcatgggagagacaagcccaaccttaaggatgtctgatttcagagaggtaaatgtactccagacataaaagcattttctgtccttagagggccagcccactaactaatacactgttagatgaaacatcaggctaaaaatctttattaagctgtaggctcaccttggaaatcagagagagtggacctttgaagaaatgagtacagccaggagatttttgtgattaaacattaccacataatttgtcttaacacttttcctttttaaaatgtcaagataattatatgttaaatattatcttaataagccctagaaattcaggttttaattatgcaaacttaggaaatgtaagctcttagcctcacacctcttgcctctggccccatggaattgtgggggctataccaaatccttcattacctggttacaggctagtggacagcgtgacattttgcttggaaatgatataggataatataagggaaaataactgtgccttttccattgtgcttttcctggaaggccataaataagtaaaattgtgctccccttgatttatgtttataactgtgattatgatgatttatttcgggttgagtgctgacagtgtgccgagtgctacaccaggctcataagaagaaatggttatgccccagaggctaacataccaagacaaacacttcggccataaaacacaccactaagagatgcttactctcagcagagcgaggcttctctgagcttatatgtaggtggagaaattttcctccatctcggggaaggagcttaatgcactctgaaagtcttcgaggctgattcctataaagatttcagacaaggatagagaaacataaaacagtgttctgggagcacggtgaaggtggtgggcaatggaggatccccggcaagcaagcagtcaggtactgggttacatgctgcaattctaggattgcctttcaaggtaaacatctgaatccaaggtagataaaacgtgctgctttctgtatgacaacccttttaagggttaaacccttttaagaataatgtaggatgagaacatttaacaatgtaaaccagtatttcaaaacacatattttccagagaacttgcttgggagggtattattagtttgacaaaaacaaaaatacatttgtggacaattgagtttgaaaagtattgttaaaagggtctcgatagggaacttagtattgataattaactaaattgacgccatcaaattgccttccaaatagctatgtttgtacacagacaagcgctgccctcagccttactcagagaagcagctgtttaaaatgaatggtggtaaattaagagattcagggctgcccaagatgctcagaataagtgacagttgtgggtttagccaaagacgagacattcacaccactccctctaaggctcggggaacgctgcaaaaggcgagggaagcttgtaagagctgaaagatggggtgaagggctacaaatgtcaccctctgaagtgatacagtcattaacaatcatcagctcacagcaactgtgggcccatacaaggccaaccctatcaacaatcagtcatggaaagggaaagggctcacaaggtcctatgctgtagtgtccagttattagatattggcagattctaggagagaagtcactgtctttagctgtgtgctcatttgctgatcacaacaggctccaacaaatagttcccattttcacaaggacagctctgaataaacccagtaggtcacagcctcagttacttctctgttgctgtgaagagacaccacaccatggtaaccaatttaagaaggtgtttaattgaagacttgcttaccctttcaaagggtgagtccatgaccatcatgatgaggatcacggcaggaggcaggcaggtgagacactggagcagcagcagaagagtttatatctgatccacaaattggaaatcgagagtgagaggctgggcctggcatgaacacttggaatttcaaagccagtgacacacctcctccaacaaagccatacctcctgatccatcctaaagcagttccaccaaatagggggccaagcatttaaacccatgagcctatggaggtcattcccatttaaatcaccacaatgacaaaacaaactcaatagacaaggacatgagctagaactttgtggggagggaaggatggaaaagggtggtaagaagatggaagagcatggaggtagggatgagagcagccaacacatgtaaaatgtgtgaaattatctaataacaatagataataataaaaaaaaacagaaggagttccaatgcagggattgtgagacccattaagtgggccataaaatttgccatcctctaagtttaactaaagagcagttctagtaggcacttcacaggacttttctaggatactcacactggaaatcaccaagttgattgacaagaggatgaacagaacttccatggtggtttgaagagttgtttccccaatgtaaccctcgcatcaaaaggctggatggaccctgccgtttccaccagctgagcaccgcaccccctcaccttctaagcatggttagaaggaacaggaaagcaaactaacgtcaaataaatgagtctacacaaatgcagtgcccagtttcctagaaagtccccagtgacccctgttgcttggtttttctgccctggggcattttcctcccacaataaatacaactaaagtgtgggcctcacagagtgtgctgcaaggctaggtcacgaaccacattacagcttgtaccttgctgtgttggatggcttgttctggggaaagccagctgccatgttgtgagactcacagagggatgcgtgccgtaatgaatgcggtacctacagatgctccagcgagtcttcctggaagcattgagtccagtcttcagatgactacagctcagccaacatcgtgactgcaaccccagacactgagccagggccacccataaatgctccaaaattcctgactcacaaaaacaaagtaagatggttttaagccatgttagaagacattgtccagactttgaagatccccatggacggcctcacactccctggggaacagaaagtggatggcatagagagttggtgggggcaggagaggagggaagggcgagggaactgggattgacatgtaaaacaagattgtttctaatttaaattaaaaaaggaagaagaatttgttcataggtctcatgagagcagcatgattcaaagagactatgaaataagtgacaaggtagacatatgtgagtaactgagcataggagagagagaaactgagctttgaacttggggaggtgggcagaagagacgggagagaaaagatagtaatatgtgaaattatttttgcctggagaacaattgtgttggttggtttcccatcactctaacaaaatacctgagataattaatttgtaatgaaaaaaggggctcacggttttggaggcccctgtccatggtggattggccttgtcactttaagcctatagtgaggcagaaattacaccatggtggtagtatgtggctgagtaaaatcactccatggtaagagaggaaagagaggatgactgaaattacagtcttacagtcccctcaaaggcacaccaccctatgacctcaagtcctccctctgggttacatctttcaaaggttccaccctcttcctgtagcaccaccctgaggatcaaacctttaacacattggtctttaggggactatccagactgaagcacaagtcccattaagaccatttgggaaacgtgcatgaatacaactgaatatgaatgtctggatggacatgtaaaccataagaaaataaattaagtcctttgggaccgtagatctgaccccaaagcagaggtgcataaatgtgctccaatctacttttgtaatattttcatttgtgttgacaatctttaaagaattctatacaaggaaggtggaattattttctctcattacaccaaatccagaaatagctcatgaccaatgatccattacagctgccaatagaaataaatgtactcgaaactttgcaacaggctcaatatgcacacagtcttacccagggaaatgcacgtagcagtaatcagtattcctctccaggctcggacctggtggataattacaattaagcttcaatggattagctgccagaaggacagtacagagtgaaaggtatgttacagcactactttttcttttgcaacaaatttgggcatgcaggttgttcttggttttgtttttgttcttcccctcctccacaaaaaaaaaaaaaaaaggtatttccaattaatttagaagcacatcaaaatgactgcgggttgtgctgggtggcaggatgaatgaggttcccagtgactctctccactatgttagcaatacaagggtcactcacattacttccagagcctctagtttacatttctcaattaggagataatcagtgtgtcattatgagtaaaaattgttggaatgaccttttgactgtctattttaaccagcaaatctgcagggagggtttgatggaatgcatgacaggagaacaaggcaagttatactggtgataaataaggacaattatcacacttattatctgataaataatttattgtgatttgccattaatccatctcacactgcctcctggatgaaaacacaccccgaagagtgacttcttcagcgtttcctgtgacatgtcagaaactcttgtctgcaaagcacaaaggaggcatttacctggaatagaaagagctgtcattgcacacttgatcattttaatcaatgcagataaattatgcccctcataaatggtagatcagtacttctcactgactttaaaagggaagtcttcaagaagccagctgaaggacaagccatagcccaacacttaggagtctgctctgtttcagatcctgtcatcaattcttgctaaaagccatcagtctacacattttagtcaacatctgaagcttaatcctaagtacagacaatatatcatcttacaataagataattaaattctttacagaactccagagattcagctggtgaggactggttggatttgtaaaactgattgtgaatgttagagcaccatgatgaatgctgcttcttttaactctggatcgtcctcataggcatgtgtgaagcatgttcagctctgcgctggatgagtgaagtagacaggccctttggacacgctagtcatacttccgatttcaactgctgatttcttgaatgatatcagcaatactgttttctcttttgtacactcaagaagagacaccatctctcttttttataacctttgttctctttcaacagtagagtttaaggaaaatagtttgactttctactgtgtgttatgctaaagagatacttcttactctattttgttgtctggcttgtttttctcttgccatctgtggtcactgttttgcttttctgtactcaggtgagctaccaataagcctgctctcatttcatgggctcccaggaacactttgagggcagaaatccgtgtattgctatcagaaaacacaagctgaaattgcctgttgtggtcttccctgcaagtgaaaaacacttctaaagcactgttgaggatgtgattatacaacagtgcaagcaatgtgacttcctcagagctagggaactcttccttacaacttcccaaattcctccgctacaacagaaacccctttaaagttgcttttaggatgtggaggtcaacttgtctcctttattcccacagacaggataatgttagtgagggaaaggtactgcagtgtctccaccaccagtacttcctcagaaacatggagtcaggaaatggcttgttgaccagtgttcccactcagtttgcctgtcggctcttgtcactgtgattaatacctagccaaagcaacttcgagaaaggtatttttaagctcatgttttcagaggtatattagggctctctagaagaactgaaccaatgggatggatgaaagatgtgttccatctatttatattcaaatatcagcagcttcctcacacctgagaggctgagaaccctttatgtgtttgaatgggtactcatcagtcagagtagccctacaggtggctggctcacactggggaagtcaaccaacatcctagttgcttctcagtcccacaaggttgggtactcagcagtcccaatctggagctgaaaagccagcagagttgctggctcttagtccacagtggaagcctggagacactggtcctgacatgagcaaaggaagcaagcagcagcagcagcagcagcaccagtaactgggtaaaccaaccaggctgcaggaggaaaggccaagcaagcaaaaagcaaggaagagccttccttctgctacacttttttgtctgggctgctagcagaaggtgcctcccacaatcaggatgggtcttcccacatcaataaggcaaccaagacagtccttccatggagacctgctactcaggtgatactaatttgtggcaagtagacattaaaaccaaccatagctagggatttcaatcacttagttctgtggtcactgtaagccagtggtaaagcaaagtgtaatagcagagaatgggtaacagaacacagatactcacctcacagtggccaggaaatggagatggacagaagggactctcttccaactaggccccacctcctaacaacccattcagctatgaattcatcaatgaattagttcactgagtggttgcagcctttgtgagccaatcaccacacaacgacggaaccaccagatgagggcccagttttcaacacataagccttttggaggccgtttcaaatgccaaacacactactcacagtctgaaagtcttttatccactgtcaggtggtgagccaggatcagtatcatagcccacagccagcacatcactgggagaccccagctccacacatcttatggagcacagctacagcatggaaagtgtcctctgtggcaatgtaattttaaatgatggggagggtcctaaaataagttcgattttcctacaaaccatctctaatacatcatatgtaaggacatcttagtgaagaatcagaggaactggtccaagaaagctcataaaatcagggcatctggaagtctgtgacaatgtaccattgaatattttaatgtcatcatcatgagaattcagaaagagaaaaaatacctcttctgactttctcctgtgtccttccataccacatgtatctgtgactatggtttggtcagaacacacaaatatcgtcctaaaatgagaaagaagcaaactttcacatgcatttcttacagatatgctcctctttttcaaagataattccctttgaatctcattatccagccctcgccttccagaagctccatgggattcagttaaggagtcctggattaacaaggtttcactgaatgcaaaaggacaagccttcgccttgaagcaaatccaggatggcccttctgccaagataggaccctccagtacaccccagcaagaatgagcttacaactcatagaattccagataccctgctgtgggggctgggggctcaccacttagcacctgtggtttggatctaagcaaacagaaaactagaagagaggacaaatcaccagtaaatttcttaggcgtcgatccacaaatacgaggagccaagggaaataaccaggaaggccttgaagtgatgctcccagaaagggaattatgagctggttggcatcagggaagctgttgggataaatcaagtgagtgaaacgtcaatactgaggaatgcaatctgtgaagagaggacaaaggggtgggaaaggagggcttgcgccatagatcaagaagagcgggactcgcaaggaaatacagatggatgataaaggaagtggcagcattgacgctttatgagctaaggtagaagaaatatatgaaataaaggggaattagcaccaggtgtcctccatgcaccactaaatcaggatgaactcactgataaattaccatacggggaaaaaacagataccatgtccccataaataaataaaatgtatcatgcagtataaatctcaatgcccatgttgctccccctgctgctccctctgaaatggcctgaggttcctggagttcctctccatcttttcctccttctgactctcaaataagtgtggtggctaagacccctgtttaactacttgctgttgagtgaatgactgatagtcttggtttgggtccctcgggtcccaaaggcagactctaacctctctggggtttaaatataaataaataaacaaacaaacaagccaaacatagctaaatgctaagtgacaggatcacaaaactctgctacttgagatttcaattactgggacattgtttaagggataataaaaagaagcaaactgcaggtcatccggggatttttagagcagtgtcgctcttagtgccctgtttcataaagtggaaagggcagctagaggtgaggtaatttgggcctgctcacaactcataaggaaaaaccaatcaggaatcttgaggtgaagggcacttgggagcatgacctgattccatttgctatgcctgacttgtgcaacttctcatagatacacaaaataggaaaagggtgaagccgtaagagggaattctaccctgaaagttaaaactcacgagggacaaatcagtggcacaaaattacactgtgaaatgtcattctccaaagggcttaaacaagaagtgtgataaatgttattactctgcagtgccataagggtgttgaggactcaatcactgctccgattttgcccaacaagtgcaagaaggcagttataggaaaacagaccctgctccaaagagctttcaaggccaaaggctgtcgaggagaagcaaaatgggaaagccactaatatggccatcaaatgcacatataacttgggttcttcacagcctggtggcctctgggtttaaaagtaccataaggtcagggtgagcaaagaacaaataaagttgaaggtcagaaaggtcctgaggaatgcagaccaggaccaaaggaaaagcagcccacggcaatccttaagactggcttcgttaaagaggctcagcctacacttgcaagaacccggtaaagtcctccaagatccggcaagtatgtctaagcctggagaacagctgcactgctaatctgggatacagatcaaagactatccaaatagctagaaaacaacacccagggtggggggaactgtgattatagaaactttacaaagactgtgtgtgcctgtgtgtgcctgtgtgtgtgtgtgtgtgtgtgtgtgtgtgtgtttgtgcacgtgcactcatgtaagtgtccagtactgtcaagagacagactttagtgagtggaagtgttatttcagcattttttttcatatctatgttttcaacctgggagtgggttagtgtcagggtatacgacccaagtatgatcaaggtttcccaagttagctacccgcaggaggttttccaagaatgggcataaactaagggaaagctctctgtataccattaaggagaaggaagaaagactcaaaactccagaaaggctttgcatcccgaactctccttggtacttgatcacctagctatgaacaaggctcttcccaaggctctcaatgaatcagagctatcaccaagggtgaggcagaagagctggactcagactgggagtcctcaacagggatgcaaaagtccactctcacgtggctgtataacacactagtgtatttttaaaaagaaagatatgggataatatttatagtatggcctcattttcattttaaaaagcatacgctgtaaattcatatattttatgagcatagaaaatatttgaaacaatatagcaaaatcctgaactctttattcaaatgagagctaggactaggaggaggacttttatttttgcttgattcacttctgtgttttttataataactgtgttgtttttataactttcttaataactcccttattttatgactttcgtattctcagaattcaaccttgggactccctcacagccttttacagttgcttgttaaaataacatttgtctgttcagcctccgtgaaatctcttaaggtcaaaaatctaccctctttgtgaaacagagaatgactgggttgatgattggggttaaggaagcaaaaaaaaaaaaatgagaaagaaaaagaaacaggacatctatatataacgcctgagccttgcctggatcttgaaccaacgaaaactatgttttattgtggctgtaggacattattaagataattgacagattttggtgtcaatagatttaataatatcattaatttaatttgctgattttgataattgcactatggctatgtaagaaaataacataatgtttataatacttagagtgtttgggcataaagggatatgtatgtttcttaatcaggtcagaaaataacatttaaatatagatgcacaaacaagaagaaagaggatgcaaataggattaaatttagtgtggaaattatgccagaattgtttggtctgttcttgcaatttgtctgtttaagtctgacattatcccaagataaagttctgggaaatcagagaaacaagaaggcaggaaagtacccaggctacctcctcattcaccactgtctctaaaggaagcaatccgtctctattttgtttgtttagctggtttcatttatttgcaaagttttatcttgttaataaaacctgatatatattcaaaaagttgagttctgaacaatattttgtgtatggtatatgtattcatagggtgtgtgtgtatatgtatgtgtgaatgtgtgtgtatgtgtgtgtgtatgtgtgtgtgaatgtgtgtgtgtgttggggtgcatgtgtgtctatgtacatgtggaagctagcggttaacatcgggttttgttcctcaatctttcttcacaatttttattgagacaaggtctctcactaggacctggactcgccaattcaactagactggctggccagccagcaagccccaggaatgcacgtgtgtccaccttcccggcactgggaccctgggtgctcacctcactgctgcaaccagctgttttgagtgggtgcagaggatccaaacctcatggtgtggcaatcacttttgtgtgtgtggggggggggttgtttgtttgtttttcttttctgagacagggtttttgtgtgtagccctggctgtcctggatatctctctctctctctctctctctctctctctctctctctctctctctctgtgtgtgtgtgtgtgtgtgtgtagaccaggctgacctcaaactgaaagatccacctgtctctgtttctcgagtactgggattaaaggcgtgtatcaccatgcccagccaagtcacatcctcagccccactcaaaattaagactaactaataaatatactcaaagatatttcattcacaactaaaccttaagagccagtataattaccctaacctcttagtggtgagaaggtttaggaattgtagatggtaaatctatgatcagaatagaagctgagtttactagttgctcattcagtatgattttttaagtcagaattttgtgatgcagttgttctccttcagtggaaaattgcccctgggaaactacaagagttcatcaaaggcagagggtcagagtcttctgtcggctatggtgagacactggtcatattgctatgcaccccataaatcacaagtaataatatcctgaggcattctcttctgtattaaaagataagaactctgtttttgtttccagaaccattgctctcttccctgcttcacacggctcatgtaattcagaagatagacttcattcaaagaatgaaaaataggtgagtctgagtccccgtgcttccctccatcaattcagcaagctgcagaacgttatctgccttgtaagtagcccagctcctccaacaagatgaacctctttcctccaacagccttcttcctggggtctcaccaccaaccctgttaacaccaccaggagaaaagtttgtgttgctacaggaagcccaaatatgaactttatgtaggacaggcaggactcatttttgaagaacaaaacacatagcatatgtgaataatgggccttggcagtaaaataaggaaatatgctttgtgcagcctggcaaatgagggacctgctcaagtcattgcctaacaggaaatatgagtccagagtctttgtgtgcagatcctccagatttcccactccctgggtgggggcgggggataaagtgcacgatatctcaggccttcccacagatacattgatccatccacatccacattttagcaggattcagagtattatcatgtacattagtggagtctggcaaacactggctacaggaaatgatgcaatggtcagcccaggttgtgcctaagaaaagtgggaagaaaggatgcatacatgcaaacgctatcgagggcgagtaaaaccacaaagacagacgggcatctccagcaactcatccctccatcgaagctcatctcgtcttccctgagttttggatccataactggcattcaccccaactgaagagcagtggcttagcagcctaaaggctgtcatgtcaaaaggcattgaggagaaattaaaactaaagcttcagtgtgatgcagcagcccccactcttggttatacagccagagggaataaagtgagtgtgtcacggagatcctgcacccacaccttcaagcagcatcgatcacgacagccggtttataagattaaatgaagtatttgtcaatggatgaaacaacaaaaaaaaaagaaaacatggagtattcacacaacaaaatattattcagccatcacatgaaaaagaacctgttaactgagatagtgtggatgaacccagagatgcaggaagacaagcaggacatgggtgtgctagcggagagcaggatgggtttgaagagatggtcaagagtacaaattttcagttacaccagtagaatccatttagagggtctgttgtactacatagtgaactgtagttagccagaatggattgcattttgaaaagattttatttttaactatgtgtatatgtgcctgtgagtagaggggccagcagaagggggcatctgatctcctggagttgtaattacaagtggttgtgagtgctgaaaacctgagtcctctgcaaaggtagtacacagtctgagctgtctctccagccccatcccagtctttttaaacatggttttaattgacatgtagtgattgtgcatatttccgcagtgcggtatcactttcaatacatgaaaataatggggagtgatcagatcaaggtaactggcttatccattactttggctatttaccatttccttgtgttagaatatgtaaaagcctccctattccattaattgctgctaccaatagtgtcctactgatccagaatgtaagaaaccactccccatacccagctgtacctctgtgcccactcaccaccctttccccatctcttcttcccttgatccttcccaggatccagcaacaactattccattccctgtttctctgagatcagctttttagctcccttgtatgagagcatacagtgtcttcatcagcctaacttatctcactttgcctaatatcttcaagttccattcatgttgccacacataacagaatttcactcttttgtggatgaaaaaaataccattgggtattataacacaaattctttatccattcactcagtgatgggcatctaggtccgttccatttatgggttactatgaacggtaatgcaatgcacttgagagtgtaggtttctctttgcatacttacttcagttcctagtggtatacagtaggaagcttgttaaatcacctagacattctgtttttagtattttcagaaactaccactcttttttctataacagctaactcattaatattcccagtgtataggagctccctggaccctggaccctggaccccagcccagactgattattttcgtctttttgttcataaccattctaactagcatgagatatctcattgagtttttttatttgcttttctctgatgagtagggaagctaaacatttttccatggaattgttcatttgtttattttttgagaaatgtctgtttaggttattttcccattttctagtcctattatttggttctgttattcttgttatgcctttgatcaggttccttaaaggatctggaaatcagtcttatgccaaatgaatggcccgtgggtgtctccttctgttccataggctatcccttccctctgtagagtacttcctttgtagcacagacttccagtttgatggaatcctatttgttagttttctttggttgcctatgatttggggatcagagtctgaaaatgcttttcctaaaccaatattcagaagtgttttctagtaattacatagtttgggggtctcacatttaagtctttatcattttcctatgtaagatgagactcgtgtctgatgtagtttcttttttcttcatgtatgggtgtccaactacctcagcaccacttactgacaaggctgtccttccccccaagacatattcctgctggcactgccaaagattggttggagagaaatgaatgtgtaggcttattcctgggttctctggtctatcccatcagcctgtgtatcagggtttttgtcagaaccttgctgtttcactcataatgacttcacagtatgtttttaatatcaacattaaattataatgcttccagccttattctttttgtgtgggatttctttggctgttggagagacttttgtggtttgtgtatacattctccaaaattgctaagattgtgtattttttttcctttttaaatttaaattagaaacaagcttgttttacatgtnnnnnnnnnnnnnnnnnnnnnnnnnnnnnnnnnnnnnnnnnnnnnnnnnnnnnnnnnnnnnnnnnnnnnnnnnnnnnnnnnnnnnnnnnnnnnnnnnnnnnnnnnnnnnnnnnnnnnnnnnnnnnnnnnnnnnnnnnnnnnnnnnnnnnnnnnnnnnnnnnnnnnnnnnnnnnnnnnnnnnnnnnnnnnnnnnnnnnnnnnnnnnnnnnnnnnnnnnnnnnnnnnnnnnnnnnnnnnnnnnnnnnnnnnnnnnnnnnnnnnnnnnnnnnnnnnnnnnnnnnnnnnnnnnnnnnnnnnnnnnnnnnnnnnnnnnnnnnnnnnnnnnnnnnnnnnnnnnnnnnnnnnnnnnnnnnnnnnnnnnnnnnnnnnnnnnnnnnnnnnnnnnnnnnnnnnnnnnnnnnnnnnnnnnnnnnnnnnnnntatatatatatatatatatatatatttcaaaacaacatatatacatgataagtgtattcaaattttccaaactaaagcaagaataagaaagtgttcaagtgtgaaatcattctttgcaagcttctgggctacacttcaagcctcacataactgcatatctatggtatacagaaccccagtctccacatctaactggactatagaatgagggggggattctgctttgcttttaccactttgcttctgttcaaacaaggtacccattcatgaagagctttccaaagtgcagaccatgatgcattttgaccacatcacaccaggctaccattgtgttccctttgcctgaaataccataggacgccccagaaatcagttaagtgaatgcttaaacttccaccaagtgaagtccctcctgttgtttccagcagaagctgcccacatcaccttgggacactacatcactgagaagttgtcatttccattgactggaaccatgtctgtcaaagtgctgccacatcccagtgggccctaggcaccaccgggagcgccactggaggcccacagctgagctgagcttctccatataaaggtataaaactgagcagacgaagctggtaactataggtataaaaactgcaatgatggagctgggaactaactataggtataaaaactgcatagacagagctgggaactataggtataaaaactgcaatgatggagctgagaactaactataggtataaaaactgcatagacagagctgggagctataggtataaaaactgcaatgatggagctgggaactatacagctctgtgagtaagagtgcttgctgtacaagcatgtgtgatgagtttgaaaccccagcatccacatgaaagtcagacgtggccacgtatgcttgtaacacaagcacttgggaagggaggagagacgggcaggagttcattggcccgccagcatggctggctgaaacaacaagcttcaggtatagtgagagattcagcctcaagagaaggatgagcaagttacaggaagacactgacatcctcctctgcgtgcgcacaaacaggtgcatacacctacacatatagatagaaacacacgcacacgcgcacacacacacacacacacacacacacacacacacacacacacacacacacacctttttagcctgaggaaaactgcatagattctgccataacacctcactgaactgtggtgaccctagtacttcagttttcattcccagttcgccttcagcctgagacctgaaaagagaccacaggcagggtggcatgccacccaggacaagaacccgaaagttgaaaggccaggcttgccatttacctcatttttctaccagagtgagatcttctcctgggattttctggatcctttgtgcaaataaaccttctagaagttctcttccctttccactcctctagttcggtgcttcagatagatgggaagggatatggtttagactcccgatgggagatcttcagctacctttacaattgagttcaaggctgtgtggtattctgtccatggagaatcacagattatccctgcaaggtggaccactgggcatagtgaccatgtttaaaggttacgtttccaattctgttccagaaagctcctccttcatctctttcccaactgaaacccacaagcagacattttatgtctaactggacttggaaaccaatgcaaagggttctcacgtttatggtccaatcttgtacttgaaaaagaagaaaggacacagagaccatggagcaggtcatgtcaaaacagaggcagagatgggagtcacagggccacaactaagaaccacagacaagagcagaaattgctcgctggccatgaactaacttgatctctgatctcttccatatacactactatttctggcaccttttccatcctggatggtcctccatacacacactaatcagacattggtctatcataaaggaggaggccacaacaggtctcagattcaactgtgtggcgggggtatcctcatctccctctatctagattgcagccccagctgctcatattcaaactcctctaaaatgtcatccatcttcccaggggtagttctgcagctaacaacaggagcacattaactccccaaagcctttggccagcccactcacccacctgcctcggaaggctcccattttgaagtggcaatgtgatccatcatgttctacagcccacacagcacagggggaaattaatgacactgactgtcattaatttcagaatgtcagaagcgactcaactagacagcagccttcacaacaatgttctggaaaggaacaccccatttttagtcttcagtcttcagtaagaaaagggaaagaggaaataggagagagagagagagagagagagagagagagagagagagagcagagagataatatacatacatatacacatatagataatgaagtgcaaaactgtttgcctaccaaccacagcaggaactatgctctaccagtccatgtaaaaactagagctgccctttccactcgttgcttaagcacttcccagacaccaaaggcaatgaacagagatgtgcttgatttagaatctcaacccagcccctgtggtttgcagatggggacttccaaagccaacccaatatgaaccgatagaacgcaaggacagaggaaggccctctggccatccatcacccactcccagaggctctgcttcatttcctgcccaccagacctcaagaatgaagactggtgtgctcgttctcacattgtctttctctctctctctctctctctctctctctctctctctctctcctgccacctccttttctctctctccctgcctgctcacccactcttcattcttgtttcaagatgagcccaggagtccatgtctccattacaaaacagctaatccccacacaggaaaagcggtgaggttaaagccagccagatctgcttagctgtgtgcactgcttgaggccatgcctatttccttcactgttcccatgaggaaaagacttctctatatttatttctcccgtccctggtccaactcagatttacacacccttaaacaatctacttcctaaatccaatttccttacatgaccatttacaaggaaacatgtaatgattttgaaacttggaccttggggagctgacattagggtttccaagtcatacccagaagaggagacaaagaaaggtgacaagatggacttccccttctcgatgtctcactttcacatatgggaattctttgtaggatgtctgtgcacatgaacgcacttgcacatgggtgcaaatggaggtcagaagtcaacctcaaatgtcatccatctctccctccaccactctctgtccctccacacataccccttttctctctctcagggtctttgactgatctggaatgctccaagtaagctaggctaactgaccagtgaatcacagggatttgctgcctcgacctcctcagcactaggaatacgtgtgcttgcaaccctgccttactttttaggattctggggatggaactagggtccccatgcttgcacaccaagcactcttatcaatcaaaccatttctcaaatgcagattcttcttaataagactagttttcattttaagaacaaacacaaaacaggcatcattttattataataggaaggcaaacattcctcatttgccaacttatgactattctgtctgtctttctgtctttctatctctctctctctctctctctctctctcacacacacacacacacacacacagagagagagagagagagagagagagagagagagagagagggtgccatttctgcttgccatgaaacaaaaaggactaacaaaggcctttgtgttcagtagtaaaaagccacagacaggtagaatgttgactgcttcctttctccctgttcttagaaccacaaactgccagagaacatgagtctctgaggtccagccctggtaacttgggtcgtgaggaaggaactcagaaaggctaatggcttcccttattattagagaggcaaagtttctaccagtttctcagaggttgcgggcacttgggatcgaaagaataaatgtttacaggagtcctttgttcacctatctgctcagttcactccaggaaagagttcagatagtttttctaggagacagcaaacaagcaatggtgctaaagaaaggtgaagaaagaatgcaagggtggaaccagcacattcaggtcttaaacttgcactccacaagtttgctccttactgccttgcagactcaagactaagactcttagaatttacattccctgtgcttttctggtctgttctaaattctgagtgatgaacaattttctacttagaactttaaataactaccgaggaggcaatgaggacttgcaggctatgggtttcttggtagatgatggcttgtacttatgtgaatctgccttgattttattaaaacctatttactcttctctcaagaccagcaccttcccatttaccactgactgaaagaaaccagaactgggttaaaacaaacagtgggccaaggagagggcctacaagaagcactgggtagccagtatcgtgcatggatggccttgtggatatacacaaatacctcagaaaagagtacttctccatctctaagatctgctcacaaaccagcagcaaccacctggctgggagtttgtccaaacaatggattcgtggtgttgtccagaccccataaatgaagataggcttcttagcatgacctctcattgatctttgtccatattaacacgtgatacataaactcactgatgtagatatttaaaatgcagaagtagaataattaaataattcctgggccattcagttcccatcattgtgaaggtatttcggttggctggttgtgttttgactggggttgaaactggcttggcatttgtttgtctgtttatattttagaggtgtctgttgccatcttcactgatctgcagtgagaaacatcaaatgagagttaaatgaagaaaaggtgattttggagccaatttgtttagtcatccttggcacacactgacagagatattcacccccagggggcataattgttcttgagaagtgactttgttgtagagaaaacttttgcttccagaggcacgagctacacagcacggcgcagaatagaaatatggcgattatccagttcatttacctgctttccacagcacacaaaccaatcctggtaacacagccataaaaatacaacccaaggtacctgaatcctccaggttaactgctaatgtggctcagataaactggatttcagccagcctcccacatcacactttgaagacttaaacatagaacaaaggggtgcgcgtgcgcacttgcgtgcgcgaacacatacacacacacacacacacacacacacacacacacacacacaggtgtgagcagggaggcaagtaacccctgtgtaatgacagcattgtgaccaaggatgacatcaggcttaggcaaagcctcaccaccccattttaaagtggttatcacatggaaggcagagtggcctgccaaaatacagacacagagatggtgtgaattccatgtggggagcagagacaggaatgtcagcagaacactccacctggctgggtagcaacacacgcaggactgcaggggagagtccaacaagaaagggaagggttttggcagggggttgtttttggttttgtttttttgccacatttgttcaaacaaggtatggcaggccagctggaagatatgtcagtcaaggagaaggctctctgctcagaggtgtttctgtcgcttggacatgacagctcctcaaaactaaatataaagggaaattacagctagatttcctggaggcatggagtctgctctgattgcaatttagaaagccagcagattacatagtatttgttcagtccctcctaagcaacaagggcctttctggtacattccatctactgcttattggaagggtgtagggggtggcttattggaagggtgtagggggtggcagtgccttcctgagcccctgtttagactctagggagctcagacattcctgacattgactgcgaatgtttgtacatattgacttttttttttaatttattccttgtgtctttcacaccatgcctcccaatcccaccccaaataaaaacaaaatcaaatttaacgggggaaagaaaaggaagaagggaacatctcattatggaagctgcagtatgacacagtgagtcacatgggaaacccttttatccacgtttttgcaggcatttaccgaaaagaatcgttggtctggttcaagacctctggtctctgctgcaccgtcgactttggatcctcaatgggactcttcctggacatcccattgctgccctgtgtcatggaaatcctgcagctccataggactggccctcccccatgctccagcagatcacagatggagtggatgttggggtgggccaactcatagccctggttctgagcctgggtagttgtggggttggtcaacctgccagctctcccctgtcttcgtcaacagggtgagctatccagcattgccctggctagttcactccttgtagccatgagcaaggaacagcaccagttctcctgctttcatgtcctcagggagaactatctcaaaaaaaaaaaaaaaaatgtgggggagagatggtctggtggttaagagcaccatctgctctttcagagaacccgagttcaattcccagcactcccatgacagctcacaactgtctatgaaactccggtactggagatccaataccctcttctggccttcacagacactaagatacacacgtgatgaacagacatgcatgcaggcaaaacactcataagcatagataaaaataaattaaattaagcagagtctaggaacccagataagtagtaaagtgcttcacaaggccctggcttcactcctcagcacacaaaaaataaacaaacaaatgatccaattggctgaaatggctgtgaagggtaaagccctttctgccaagctctcatttggtggctttattcaattctcctaaaaccctgtggctagaatcaactcaaaaccacaaagggaatatggaagtttattctgaaaccaagtatgagtgaccacggctatagaacacagattcaggttacccaaagatctatgttccaacctagtaataggtttgttttgtttctgttttgttttgcttttcatgtttttagtacaaagaaagaaaggaataaaccaagggttattttttaattcaatagtggaaatatcaggcaggtggttatagcaaaggagagaaatctctgttataggtctcaaattgtgcatgatggcgttcttagcctttggtttggtggaagctaagggtctgtttgcacattccaaaaagggttttactgatagtcatgaggatgtcaggtcactcacagaggtgaacaatggatgacgattaaaggaacaaaaaaatagacccggtaattggctccaaatcagcaacatttctgatctccacagtcatagatgtcctagtcattggaccaatcctgaaaaatctttaatacaagtatggcttttttttctaaacacttcagtcggtacttagtcacttggtattttctttttcttttggtagaaaataaattgtaaaatttataaaagaagacactaaggagagtcagtgtgagaatcagcatgactctcagctggcctctgaagaacaaagctgagcccagacattaggacggaaggaaggccattctagctagatgcaataggcaggaagaaacagaacagtgggaaggaatataatgctaacagagggcacccctcctcctattgactgaggtaaaaatcatgagacttaagtgcatccaaggattaaacttccagcccatttagtcttaaatttcctgtcacccaatcccgctgcaaccaaagaataacctcgcctatcagagaccctgacacaaagcccaagagccacttaatgccaatatcgatccaagtgagtgcatctgtttactcctaatgcatagcaagcagggaacgtgggtttactgtaggtcaggaggaagccaagggtttacggaaggccttggagtccagacaaccacgtgcagcttctctagaaggaaaaggccatcagttaagtatgtagggtctaatgtattggtagtcccccaagactggacctacctcaacataaataatatttggagactagaatattccatgcacgctgcaatacgttttagtcaggcttttagacacacatggacattcgggacatccttctgctttctgaagcagaaaaggaactcaacagagggaatataagcagagaatcctatgtaattgaattgtggtttttaagtcctgtgactaacaaaaagcaaagtcctgccctatgtactgggggcctcttctcctcagcctcggaaaaaccccagacacccatgtgggccatcactgtcagccacggatccttcggtggtattatttttagtggcatactctttttttaaaggatattggtattagtgagacaagaactccaaggatttggctcataaatgaatcttattcctcagtaagccagtctaactcagcatccctggatgggaatcactgtgatgttttcatttcccacaaacagagggtaataaaatagttaaaaagtaaaggggtatggcattgaccttgttgaggtagatcagaagttcctggagggcagggataggattggtgattggttgatctaatagttattaagtccgaaccatcttcttggaccctacaagtaaatgtatcaataggcttcatcacaagaagaaggaaaaaaggacatgttgctcttttagaaaagaaatatgttgcattccctttgatgccttctttccttcagctgattaacgacttgaaagagttgttgctggcttaagaaacagagagtagaaagtgctgtctgtgttccatatcacaagagcaaaaaatctctctctttccatccctccctcattccctccctctctttctctgaaataacaaggtggtaagcaatggaaaagatggggtgggaaggaagtgtgggactcactactctcgaaaacattcgaagcacacaatgtcaaaaattgtgcatagtgatgagatttcatacttagtatttctcaagccacagttccgactgcaatggatgtgctgtctaaggaaacctaaaaataatttttaaaaaaaaaatacatgaggagaggcgaatttctaacagttactgtcaaggccagcaaagcatgcctctaaataaacttcctgcttgtgcccaccagtaagttgcctgaaaggagtatcagacaacaacactgaaggaaaggggcagttatcctctggggaccggctgcaggaggtggaagtgccccccataggctccagcagctccacagtgcccaattggcagcctctcttccattatgcaaaggctatgttttataaacacatctaatttggtttaaactttttaatccataaagtcattactgaaggaatacaggctggtaacctgatgaactgacaggcacctaaagcagaaggaaaagctcaggtaaggtgagagtttgctgcactggctcccccctctcttccccaccccctcactcctgcaggcccttttgactgctctctcctctgtggtttcttcaccaagggacctactctttcctttcagcctgttcctcccctcgtgccaaagaattctctctctctctctctctctctctctctctctctctctctctctaagacactttctctctgtgtagccctgtctgtcctcgcactctctctgagacagagagagacagagacagagagagacagagtccattgcctctgtctagtcctacatcccaattactgcctcctgtaccattaagttgaatatacttctatacataaacatcgctgttgttgttttttaatgaggcagggcctcatgtagcccaggcttgtcacaaattcactatgtagtcaaggataaccttgaactcctactagccactcctagctcagagagctggattagcatatcctacagtgtctacttcatacaatgctggggatcaaacccagggcccaagcatgcttggcaagtattttgccaagtaagcttcatcacaagcacccaagcaggcctgtgctgtttttgttttgttttgttttgttttgttttgttttgttttgtttgagagtctctgccattcaatccctgatgatgatgtagcctagggaaacctcaagttcatggcaattttgcctcagtctttcaagtgttagaattacaactatgagcctcagatatcccagaattcactatgctgccttgtactcctgacaatccctcctttgagttcgagttctggcaggtaactaggcataacatgagaggatttttttcccctcagagaacaaaggagattctgaaaccataccacgaactgtatttaggaagcctctaccacatgtgcttttaagggatttacaaacctgacttgcttactcctcactacagtcctaggaaaagggtttcatctgcctatttcccagaagacaaagcacagcgaaggcagactacttgcccaaagccgcacaactggaaagcagctgtcagaatgtccatacacctagtctggttccaaagtctgttcttaattttttttttcaatttatttattgggggtgggcgaacatgggtttcacagcacacatgcagaagtcacagccagccagatggtatgctggctgatgacctgagttcgatccctgggaccctatggtagaaagagagaactaaagtccattcttttaactgctgttctctgctgcttagggactgtttgtggctaaaggtttgggagatgctttcatcccttgtgtatagattctgaccactctaccaggggaaactagataacttatgagtcaatcgattatcaccctatttctccttttggactgggtggtggtgctgcatacctttaatcccagtactcaggagacagaggcaggcagatctctgtgagttcgaggccagcttggtctacaaagctacacagagaaaccctgtctcaaaaaaacaaaataaataaataataatatttctcctattggatgtttaccctactgtgcaaatcaagtatgctcaagactcaagattaccgccttgcctttgacatgtctactaactagaagtactccagaccagcctttcccatctctcccagctcattctcttgccagtccacatatataaccatcacattccctttccaaaaagcaatattttgtccctagcgctaggaatccagtcttgtgctgggccagcactctcccacttagacataggtccagctccccagagtagcttggtgctagtcatggtgttcatggtggtggtttgctttgtcttgtatagtttgaagcaaagcctcactacataatctacagtagcctcaggctcactaagtaggctggactatcctcattccctgcacactaggattacaggtgggagctatcacacccagcaaacgtgagagagaggtggtggggagaaaggaaggtgggcggggctcttaaagaactattctcaagggctttgccctacttctcagcaaggttaaatatagcatccgaggcagctgccgcacccagacaaccctggaacacccaatacataagccagcaggctgacacagaggtgaatgcacactactctcagtcccccctctcctgtgacagttggcagggcttcccagatgaaagtgggcaaacgtgagagagaggtggtggggagaaagggaggtgggcggggctcttaaagaactattctcaagggcgactccactcttcgctgcttggagtcagaacattttcttacttcgggactggtattttttagtgaagtttctttcaaagtatgctgtgcttttggattttaaaacccagaggcctcgggagttttttcctcccttcaaaaatggatggttctgcttttcgtttaaggtgcagtttagaaagaagcagcctgtgaaaccaattaactaattggaaatcacttaatgactgtggcagcgttttgggtttctggcgttggttcacagcagtcaagagaaattgctttccaatattatgataaggtaagccgtggaggtctctcgggggcggctgacggctgctgagagaaacaatcaactctaatatgcccaccaaaataatagagacattataactcggagctcagtgattgtaaagtaaagcaaaacataaaaatccaaagataggctgggatctgctgagaacaaatgtgcagccatagtccttcgtgatgatttctgagaacttgcagtcctccacacacattaccccgtggaaactgctctcactgagccagccaggcatgtgtggaaagggaagtgacatgcaaagggaaaagaaatagagtaaatgcccaccccggaacaattgtccaattaattgtttgagtatgaatacagtcattgttcacattagggaaataatctagctaattgctcaagagttagcagagccagagaaaataaattagcctagacacagtgtttcccctatttgccatttgtttgtttcaaggtagcaaatctcttttgcatttttccaaagagtttatttcattagagctaaatcatcactggaaaacaacatcagtaacccctaaggcttctcattccttttgactttatttaaaagggagatagtgggacctgcacagccaaaaggatttaaaattgctgagatggccattacccagggcttcggacctattctgagcatggaagttctcttagtcccccttggtcttagtttacccagctgtaaaatggactgctggaagaaatgcttactcggatgatggccagattttgtgaccaggaaggtactacagactctccagcaatgatgaacttttgctttctcctcccctttgccacagtaatcatgggcaacagagattctcctggaaagtgtaactactgctttccaacaagagaaattccagagtaggagagatggctctgctagctctttcgggggactggctttagatcccccaacatctgtatcaaatatctcaaaactgcccaaaaatgccagcaccgggagatctagtgccctcttgtggtctctacaggtatccacacgagtgtgtgtatacgtagagtggagaggggagaatctttctctaaaaaggaaattcaatacacacccttgtcacaccaccacctgtatatggggcttacattaccccagccgtgttgatgcatctccactgggcacattcttagatggtcgctattatggttcaaatgtgaagtgtccccaaaaaactcatgtcatgaacagttggtctccagcttgtgacactattttgaatgctatggagcctttaagaggtggctctggctctcagaagagggtcactgggatggacctttgaagatgatacccaccccctggttccagtccctgctgtctcacttcagattcacacacacacacacacacacacacacacacacacacacactcttaccacaattgctcctgcaatgccttcccacagtgtggactgaaacatctctgtaaccatgaggcaaaatcaaccttttctcacttaagttgttagtgttggatatttttgtcatagggacatgaaagtaactaatatatttgtgctgtgcttggttattacccaaaagctgaaaggatgaaagatgttccctgtgtgacagtaccataaacaaagatgagtgctatttctatgaatcactatgccaagcaatagattacctagtactttctcttcttctgcctcattcagagaaaactaccctagaagcctttaacaagtgaaaacacttagggtaaaaggacaaatttaaaactataataaagagatagttctccctttacaaatatttcaccctgtgttggggaaaatgttatgattatttcttttcttgagtcttgatttccaacttgcattccagaaagtagcatgttttattaatatcaagattgtatcaaggcatcaatactgatggtatgatttttaattagtaattttaaaaaatggtgcatagggactgggaaaatgactccatgggtaggagcacttgctgcccaagtctgatccccagcacccttgtaaaaagatgggccctggcacacctaccaccccagtgttgtggggaatgcagagacaagagaatcagtgaaatttgccagctggaagcctagctccagattcactgagactgtttcaagggacacctgacatccttctctagtctgtgcacacacatgtaagggcctgagtacatacagcattcatattcacactcatatacacacacaaaaatcaccaagtaaaacagagcaacaaaccaacattgagggtgaaacttccctaacattaagcagggtgtggcggcacacacctgtaatcccatcaccctagaggtggaagcaagaggatcaggagttctagatcatcctccactacatagcaagttcaagtccagcctaggctaaaggtgaactgtctcaaaataatcatcatcataataataataataataatttcccagatgtaaaataaaaggaaaatatttcagccctcttagtgaaagcaaacctccagcatttcagagaagaaaatcttgaaaattaacctcaagtagttcagaacattttccaagatgacacggcctaagaaaaacatgcagttcaacggacaacattccaagactgtcccacttacacatgctgcacactgaccgaaaagtgaggctattcctatgaagacaggctaaatgccagcacacagcctcgtctgcaaagctctgcactggagcttaaatgtccctgattaacaaatggtgagccatttagcccatctcacagagacaagaccaaggccgaggtctaacaatagctctcctctctcagagtccttgaattagtgaatgttattacaaaaagaaaatatgcttttatctaggttgttacttttccctgtgctcatctgcggctttgcctataagctcacagtgcacagttaaattggacaattaccaagcgagaagtacataattaatgaacagtcactatatatgtttgggaaactgtgacccaatcacagaacagatagcaccaccactaaaataaatgacttgttccactcattacctgatcagcatttgtttagaagttccttggtgccctatcaaaattctaatcagttctatttaaattacatttttttccacagcattgttaaaaatgctaatttatgcttagaaccgaacggctttatttcttacctcctgaagaaacggatgaataaaaacacacttctgcagggcacagaggattatcaagggttcaatgactattggattttgcacttgccaaaacacatcctgcaactcagagctgaagcttttgggaacaacaaggacgtccatctccatgaggggacacagcctgttaccgcagcatctgctaccacccctgagactcttcttttaaggatgggaccagctctaggagtatggaaagaaagacaagctcaactgctgatgcaaagcatcttgaggacaatgatggttgcttcaatctctaggcaaccttctagcatgcagaagaacctctctgggcccagtatccctcttgtttatgatgatgtgcccagcagaggctaaatggtaactccacatctctttatcactgtcagtctgggatccaaatttaggaccaaagtggcactctaagcaaggagagtgacctcacacaagtcatgactcaaaaactgctttcacttcttctgacatacaagtgttagaggaaagaaaatccaactcctggtcacgagaatagcatctctggcttgaatggagacctaaccttccagttggagcaggttgtacacttggccaaggtcctaccttaggaaggcaggctaccctcaaatgatgctaaagagataggtgggatacttagtcctgtgatgaggtattatactttcccctctgtccctagtacagtaacttgcagagccacagggctacagcagggaagtttgcctgctaaagtgtcatttctccctttgtccttttccctttctaagcatgctttccttaacacattgggctcttttatccaatattttgaacttcttcaccctgtctctcaagcctccctccctgtcttatgtctcaccaccattaaaaagtcatgggtttttgtttgttttttgttttgttttgttttgttttttccttctctcttgtatcctcctcttccaggcaactactgaagtttacagtttatttgccccggggtttttcttctaaacagaacaatttcttcctttagcttccatgtgagtccattcataaattcttattaatgaaactgaggactccaagagagggcccagatttccccagtaccatcaggtcagcctcttgtcacctataggtggcccagacacacccttatgtcatttaggatccagaagacttcagaatagggagaagatttccaataatgttctggaacttgctagaaatctgctaatgagatcttataggtcatagcttcttagctgaggacttagcagagaacttgcctagcctgcctgaagccctgggtttaatccctggcactgtataaaccatgaatagtggtgaatgcctgtaaccccggtgctaagtgggtagaggcaggaggatcagaggtctacagtcatctttcgcaagctacataatgctttcaaggccagcctgggctaaatgaaactgtgtctacaaaaaaaaagaaaagaaaaatcaaaaaatgccttatacaatattgtgcaccctacccaggctaggctcagtgtctgtggaagtcagtgagtctgccattatcccgcttggagtgggcggcatcaaattcagaattcattgcagaagtttttttataagctgaggaattaccttgagaggattgaatttccaagtgtaagccagcagctgcctggatgccaaggccacctcaatcatcccacaccagctggtctctgatggagagggggcaaagtaaggctggatcagcctggcttagggccgcatggccagaggggtagaaaacataggttcacacaggcatttaaccttgattaagcagtgtgctatggcaggggcttaaaacaaggctggggcattttcccgcttattatcaccttgataacctgttcttgtagctgggaaggagtgtcacaaaggggtggggggccgaggggagccaccagaagggagggcgggacacaacactgagccagaagagaagagtggctgttttcagagtgtagttgggaagaaaggaaagatgttgctctgcatagttctccttttaaatagaaactgtttttccaggctgcatggctaatagcttcatgggaaaggaagaaaagaatggctttcactcattttctttgaagcctattcagcacagtttgaaagcagaatttccctatgaaatacctacagcagtgtggagttttcacaagatctgaggataaggctggagagggagcagaggcgaagcctaggaacaaccatgttcaagtctttgtgggagacgggggaccacctctgtccatgcacagaaagtgtctgtaaggccaccagcagcaatagtcctcaaggagaaaactacaccagcctccccctctccattccctcctaaagagaagctaacgaggcaggaacgaaaccaaccctggatggactgggtttggttttggttttggttttggttttgattttttggttttgttttgttttaatgtgtatttgtgcatgtgtgtatagtgtagatgtgtgcactgctgtgtgtgtgtgtgtgtgtgtgtgtgtgtgtgtgtgtgtgttccacagattaatattaggtgttttcaccaacactctccaccttaccctttgaaacagaatggctcattggacctgagcagcaagctctgggaaccctccgacacccaaggttacacctcatgcaacaaagtttggcttttctgtaagtgtggggggtcctgacatttgtatacagaaactgcacccactgagcatctccccagctttgacaaatgaagtcctacagttctcattctcatctacaccatagtgggtgatcctgaccttcctaaacagtgactagaaggatagtccagtcagcaaagtgactgttgcacaattatgaggccctgtattgagatctccagcatctgcataaaaaccagtgtgggttacatgttcttaatcccagcagagacaggcagatccctagagctcattggctagccagcctagctgaactttccaactccaggttcagtgagagagcctttctccaaaaaacaaggtggaaagtaattaatgtaaacagccaacatttacctctggcctccacatgtgtacacacacacacacacacacacacacacacacacacacacacacacacacacacaccacccttctataactgtaataaattcaaattttgttaaagaccggaactccaaaatataatatttgattattcccaaatccttttactacttaacattggagttacagaagaataacattttggcgcccaacgtggaaaggctctgcccttataccttctgcgnnnnnnnnnnnnnnnnnnnnnnnnnnnnnnnnnnnnnnnnnnnnnnnnnnnnnnnnnnnnnnnnnnnnnnnnnnnnnnnnnnnnnnnnnnnnnnnnnnnnnnnnnnnnnnnnnnnnnnnnnnnnnnnnnnnnnnnnnnnnnnnnnnnnnnnnnnnnnnnnnnnnnnnnnnnnnnnnnnnnnnnnnnnnnnnnnnnnnnnnnnnnnnnnnnnnnnnnnnnnnnnnnnnnnnnnnnnnnnnnnnnnnnnnnnnnnnnnnnnnnnnnnnnnnnnnnnnnnnnnnnnnnnnnnnnnnnnnnnnnnnnnnnnnnnnnnnnnnnnnnnnnnnnnnnnnnnnnnnnnnnnnnnnnnnnnnnnnnnnnnnnnnnnnnnnnnnnnnnnnnnnnnnnnnnnnnnnnnnnnnnnnnnnnnnnnnnnnnnnnnnnnnnnnnnnnnnnnnnnnnnnnnnnnnnnnnnnnnnnnnnnnnnnnnnnnnnnnnnnnnnnnnnnnnnnnnnnnnnnnnnnnnnnnnnnnnnnnnnnnnnnnnnnnnnnnnnnnnnnnnnnnnnnnnnnnnnnnnnnnnnnnnnnnnnnnnnnnnnnnnnnnnnnnnnnnnnnnnnnnnnnnnnnnnnnnnnnnnnnnnnnnnnnnnnnnnnnnnnnnnnnnnnnnnnnnnnnnnnnnnnnnnnnnnnnnnnnnnnnnnnnnnnnnnnnnnnnnnnnnnnnnnnnnnnnnnnnnnnnnnnnnnnnnnnnnnnnnnnnnnnnnnnnnnnnnnnnnnnnnnnnnnnnnnnnnnnnnnnnnnnnnnnnnnnnnnnnnnnnnnnnnnnnnnnnnnnnnnnnnnnnnnnnnnnnnnnnnnnnnnnnnnnnnnnnnnnnnnnnnnnnnnnnnnnnnnnnnnnnnnnnnnnnnnnnnnnnnnnnnnnnnnnnnnnnnnnnnnnnnnnnnnnnnnnnnnnnnnnnnnnnnnnnnnnnnnnnnnnnnnnnnnnnnnnnnnnnnnnnnnnnnnnnnnnnnnnnnnnnnnnnnnnnnnnnnnnnnnnnnnnnnnnnnnnnnnnnnnnnnnnnnnnnnnnnnnnnnnnnnnnnnnnnnnnnnnnnnnnnnnnnnnnnnnnnnnnnnnnnnnnnnnnnnnnnnnnnnnnnnnnnnnnnnnnnnnnnnnnnnnnnnnnnnnnnnnnnnnnnnnnnnnnnnnnnnnnnnnnnnnnnnnnnnnnnnnnnnnnnnnnnnnnnnnnnnnnnnnnnnnnnnnnnnnnnnnnnnnnnnnnnnnnnnnnnnnnnnnnnnnnnnnnnnnnnnnnnnnnnnnnnnnnnnnnnnnnnnnnnnnnnnnnnnnnnnnnnnnnnnnnnnnnnnnnnnnnnnnnnnnnnnnnnnnnnnnnnnnnnnnnnnnnnnnnnnnnnnnnnnnnnnnnnnnnnnnnnnnnnnnnnnnnnnnnnnnnnnnnnnnnnnnnnnnnnnnnnnnnnnnnnnnnnnnnnnnnnnnnnnnnnnnnnnnnnnnnnnnnnnnnnnnnnnnnnnnnnnnnnnnnnnnnnnnnnnnnnnnnnnnnnnnnnnnnnnnnnnnnnnnnnnnnnnnnnnnnnnnnnnnnnnnnnnnnnnnnnnnnnnnnnnnnnnnnnnnnnnnnnnnnnnnnnnnnnnnnnnnnnnnnnnnnnnnnnnnnnnnnnnnnnnnnnnnnnnnnnnnnnnnnnnnnnnnnnnnnnnnnnnnnnnnnnnnnnnnnnnnnnnnnnnnnnnnnnnnnnnnnnnnnnnnnnnnnnnnnnnnnnnnnnnnnnnnnnnnnnnnnnnnnnnnnnnnnnnnnnnnnnnnnnnnnnnnnnnnnnnnnnnnnnnnnnnnnnnnnnnnnnnnnnnnnnnnnnnnnnnnnnnnnnnnnnnnnnnnnnnnnnnnnnnnnnnnnnnnnnnnnnnnnnnnnnnnnnnnnnnnnnnnnnnnnnnnnnnnnnnnnnnnnnnnnnnnnnnnnnnnnnnnnnnnnnnnnnnnnnnnnnnnnnnnnnnnnnnnnnnnnnnnnnnnnnnnnnnnnnnnnnnnnnnnnnnnnnnnnnnnnnnnnnnnnnnnnnnnnnnnnnnnnnnnnnnnnnnnnnnnnnnnnnnnnnnnnnnnnnnnnnnnnnnnnnnnnnnnnnnnnnnnnnnnnnnnnnnnnnnnnnnnnnnnnnnnnnnnnnnnnnnnnnnnnnnnnnnnnnnnnnnnnnnnnnnnnnnnnnnnnnnnnnnnnnnnnnnnnnnnnnnnnnnnnnnnnnnnnnnnnnnnnnnnnnnnnnnnnnnnnnnnnnnnnnnnnnnnnnnnnnnnnnnnnnnnnnnnnnnnnnnnnnnnnnnnnnnnnnnnnnnnnnnnnnnnnnnnnnnnnnnnnnnnnnnnnnnnnnnnnnnnnnnnnnnnnnnnnnnnnnnnnnnnnnnnnnnnnnnnnnnnnnnnnnnnnnnnnnnnnnnnnnnnnnnnnnnnnnnnnnnnnnnnnnnnnnnnnnnnnnnnnnnnnnnnnnnnnnnnnnnnnnnnnnnnnnnnnnnnnnnnnnnnnnnnnnnnnnnnnnnnnnnnnnnnnnnnnnnnnnnnnnnnnnnnnnnnnnnnnnnnnnnnnnnnnnnnnnnnnnnnnnnnnnnnnnnnnnnnnnnnnnnnnnnnnnnnnnnnnnnnnnnnnnnnnnnnnnnnnnnnnnnnnnnnnnnnnnnnnnnnnnnnnnnnnnnnnnnnnnnnnnnnnnnnnnnnnnnnnnnnnnnnnnnnnnnnnnnnnnnnnnnctctctctctgccctctctctctctctctctctccccccccccgttcctgctctctgtcccctctctgtttccccgctctgtctctctatggcgaccggccatggcggtcagccattaccctgttcctcttcttagtctccccattctaccgggccttataataaacttatagtcaatatgtctgtctcaatatttctcttttcttctttttaaacaaaagaataacacaacctaaaaaagaaaatcaagtaactaagggaatgtacattgtagcagattttcactgtcaggctgtcaggctgtcaggctgtcaggctgccaggcacactcaccattgtggctctcttcctcctgtcttgacaggaatttaatactaactcagtagccacaagtttcctgatttaatccagaacaaataatgagggaattttacaggaacacagttacctttctttttttttttcttttttctttgagacagggtttctctgtggttttggaggctgtcctggaactagttcttgttattgtagaccaggctagtctcgaacttatagagatctgcctgcctctgcctcccaagtgctgagactgagactaaaggcgtacgtcaccactgcccagacacagttacctttctaacggagatattctcagtgaagatgttgcttatattagaaacacaagggaaaaggtcaaaggaaaagaggtggtccatctgtgaaaggattcattgaatatatctcagtttggcctccatcctcacatatgaactgttgagtaagcagaaatggaaccctgtgatgtagcactgggagcctcatttcagactgaaactggcaattactcagcattacatacaccttattggtcaattgtcttagcaattacttagaagacaaaatacgtcattactgttaagcttgaagaaagcataaatctggaaaagatacttaatgctctggatctcatacaactcaaagcttcttgcctttcagagcaatgaagagagtttagtagggatattacaaggataagcatcttcctaatttaagtgtaaaaaataggtatattacattttattagaagtcatgaaaaatcagaagggtcttaatttgctataaaatcagtacaagccagtgtgatatgaccaatcaacacatccaatcaattttaagtggtattgatagagatctagtccaggatagaagtaataatctttctgtattgtggtcagatgtcaacaccattcagagaaaagagttcatacgatctctactgtccaactatgaatttgaatgagtcaaatgtttcatgctttgtgtcctcatctgaaaatggaaataacaacagctgacaaacatattcccatagaattataaaatcaaatgagacagtttccataaaaactcttcaaaaaatcacaaagtgccattgtactggacatctgctgtttgctaaccaacaaccattcgcctcttactgacaagcacaatccagtattcctggagtagcttcagtttcactctttaccacgtgccaggtctcagccccactcagctgagaccacacataacttaggaacagccatgccaccaagtcacaacctgtgatgcgtaaagacactatgccaggacctctgagggaagatgcttgcttttcctagttgcgtttggccaaataagaaattgaacttcacaataccctccaactacccagggaaatgttagcctaaagatgaagctcaactgtgctgggcttggtggctcaagcctgtaatcccagtacttggaagatggagacaggagaatcaggagttcaagattgtcctcagctacagatgagtgtgagcatgggctaacaaaaccttatctcaaaacaaacaaaaacttggtggtaaagcaacacaaaagcaggtggaaatgaaggaaacagacacttgctctcatgacctccctatctgaaagacctgttcagacctgccctgctgaagtccctctctgcttcaatcatctagacaccaagcccttcaactgcctctcaagtcagttgaacaaggttttgtgtccttttcagcaggaacagacctaaaattgtgcattcattcaaagtcataggagaattattcaaatatatggaaataatagataagtgtattcaaatggagattaagtagatacattttagatggaaagagattaaaagcaaacctataaaataaggcatgaaagtaggtgggactatttgggagaagaaagagaccaacaggttgctgcagagaggcagcaacatgagagagtgacaaagatacaggggcatgcatggatgcaaatgtcctgctaaaacccactattttggacaatgaatgtgtgctaataaaaaaaaaagctatgtttagatttttgttgtgttatcagaattatgttaggtagaattatcataactatattaggtatgttatgactgttagaattatattacattatcttggattctaaggcttatataaggtgttatataaacacttctttctaaaatgaaatttttacttttgcattctgctcctaagaaatctgtgtctccagtctaccccatggtgtcttccttgtccttctgggctaatggccagatgtgaaattgcaacagtgatgcccacatctgattaatgggaccatgcccccccttctttcatagcttgctcccgttacaatttcaatcagagcattgctgaagcccttctacagcctctctaggagcagatctgttgacatcctcatccccatcttgagaagggccagaaaaatggcttcttactcccacactaagatccatataacacatagtgaaatcatagcattttttaaacatcggaatctaccagaatcatctggcccaagagctgattgtggtcacacactgcttactcgagttttatttacaaatgcctttgtcaataaagttttatttgaatgtagcgatgactgcctattatgttatttttctgattccatgtcgcagaaaaatagaatagttataacaaagattatattacccacaaaggctaaaatatatattacatggcttatacaggagaagttaataacctatgagctagtccaatcctagttttgagaatcttagaccatgaagactaataacagacaagaagacaaatctaatatatcccacaacacagaatattcaggttctgttcctatctgcctattagttcatagatgctgtgtacatatgtatcatccctcatattcacgttgaatacaggttgaacactgaaggctccattaaaattagttaagtagctgagtgtagtagtgtgtacctataatctcagactctggaggttgtagcagaaggattctgagttcaagaccagcctgagcaacatggtgagacaccatctcaaaacaaaacctatctaaacaatgcagcaaaggttaaataatgaatcatgtgatggaaaccatctcctcttctgcctccacagcctccaaatatctgtggccaaagtgagtcattgacagacatcaaaccaccatctatgatatatgtcgaacgacagcagcagcgcctcacagagctgtgagagccagatgaaacgaagagcgtgaggtacagagaccacatttggcacaaggtaaacactgaaatagcactaggtcatatgagggttatcataaagatggaatattctgagacacagcaggcatcaggaaagacatgtgtccaccaaactagggatgtgtcttaggtccttgcagaaataatggggacagtacacaaggtgagttccaatgtaatgtctgcaaatgactgatctcatcttgagtgccaccccccaagcaagtgagagcacagatgaggacatgtgctccctgtcccaacggtgcctgtgaaactggaaggacagaaagaagcttactcccctggggctaattaaggagccttagttatgtcaatactttaagtggagacctggcagtgtgccaagcagcatggcgcatgtggctgcatctgtggctgaggacatgtcacctcactctcctcacaactgacaagatgaagcaccaaatactggggacttcctctgaccacacctgatcaaagtcacctttgcttctttgaagttggtggctgtaactctctgtagggattgcccgtcaaggctcaacagcattccatgtacagtatagggagacttttagcaatggacaaaacctttttgtcatcttgcccagtcttccgcaaaagaattatgcttacaatggtttcatttggttgtatggggtgggcatgtgtgtccctgtatgtgcacacatgtgtgtgcagactcaggcacatgaaggccagaggttgatgctccttctttgctctctatgtcatttttttatatagggatttcattgaacctagagctcaccagtttggttagactgggtagccagtgggccctgaggacctgctgcctctgctttcccagaactggcattacaaacagcctctgctttcccagaactggcattacaaacacacgccatcacacttggcttgtacatgggagctggagatccaaactcaggccctcacgtttacatggcaagcacttcaccaactgagccgtcttttggcccctataatgtcattttatattttgatagcccttgatttggaaatctcagggactcataagatgtgcaatcccacgaaaatagtaatagcaaaagtcatcctcccccagcctctcttcctgatctaagatgacaggtagtgattcctgttagataaactgccccatcaggaccttatagggacattcagagcaatacggtttaatctatcactctcacccctgctcaattcctttctttgatgctaataacaaaagattttcccagagatggcttagcccatattgggagttgaggcctgtgtgtgcaagtgtgtgcccacatatttttctctgtaatgtgctgaacacctctctctatatatgctggcgaacaggaaagatgacttggactaataaccagtcaactcccacaatcagggggcctttcccacccagccgcctccccactgcctccatctgtgtttgttcttttgctgcataagaactcaaactgggtgacaggcctgttatttttaaaaagcctttagtagcgtctatccccagaactgtctcatcacaattatcggcaccaaacgaggaaacttcacattgagaatggatatgggtttcagccagcaccaaatgtctctccttctgcctttttgtctttccgatcagtcagaacatgtgaagccccaaatgaagagtaaacacacagcccaggttcctttcatctaggaacatatgtcatgacgggggaggggaaaaaccctattcccagcttcaatcagccattctttttctgtgacttgaaccttaaactgaaagggatgttgggagagcttgagtgctgaatgcggctgactccttggaagataataggtattcgcagcatacctgagtcttggagtcattatctcccctgcgagcacttctgtatttatatataatgagatcattaccaggcagctattccaattttattcagactttaatatttcttgaaggaaaaaaaaaactagcatacaaaagggtttgtgatgccaactcaatcagacgtgctgttgatggagaattattcaagtgcaagccagaacaggataaaaaaaaaaaaatcatttcagagaggcttctgccaaagccgagttctcctgcgacgatgtttcaagtgaatgtgcagaactgtccagaggtgagggaggaaaataacaacgaacagaagagagggctgctggaggattttaaaggaggctcagcctaactattcaggtggggagtgcaagagcctcctgcggagactggagactcattcccacctgctttcagagagtaattagaccaggaaagcagtcccttcacctggagcaggtgggagcctagaaattaacccttttgtgagtattctgttctttggcagttaaaccctggactgcgctggtaggggaggtaatttcttcctcctcctccctccttcttccttcttcctccctctttcctatctccccctttcattcttcctccctctttcctcattcattcctctttctataacaagctagaacgctggggactaggtggagctgtgggtgacagtggggagacttgtttgccacagccagcactccaagaagcgctctccactaattgcaatgcctgagatgtccgcactcaggataaacaggagtatatgatttgtctctgggatctgcattttatcctgagattacaaatccacaaagagcatctttttagcttctctctccctgtcctgaaactgcagatggaaatgagcagatggagcaggtacacaggcttaccttcccagaaacatggaaggaaagggtccatgtcttttcttagggtggttgtaaagcacacattatcttctccatggtactgcctacaagacaacacaaaccaacactggggggaaagttacagaatgtccctgctggctcctgctggccactgtaacctgaaagtagcgttggtaaactttttatattggtgttatcctactaagagtaacctgtgttgttcagaagtcaggtctggcgaaggtatgtaggttgaggctagagacctggctcaggagttaggagcatgtaatgttcttacagaagaccagggttccgttccaggcacccacacagtggctcacaaccaccggtaactccaattccggtgaacccaacatcctcttctggcccccaaaggaaccaggaacacatgttatgcaaagacacacatgcgggtaaaacattcatacatataaaataaaagtaaatctttaaaaataaagtacttatttattcattttaaatgtgaaccttaactcataagtcctagtctttggattgctaaacattttaagaacaaaggaaggaaggaagggaggaagggaggaagggagggagggagggagagagggagggagaaggaaggctagagacagatgataggaggataagatttcattgcctcatgaaaataggaacaatattctttaacaaaatccttaatagctactgacagtaatcattttaataaaaacccctggggctggagaggtggctcagaggtttaagagcactgggtgctcttgctgaggacccaagttcagttcccagcacccactgcctgtaactgcactcccaccagggagccagggtcctcttctggcctgcacaggcacctggcttgcacatgatacgcatacattcatgcaggcaaaacactcatacacataaaaaatcttaaaacaaaaaagaattatttcctcaaacggttaccgaatcagttcaagctagaattaccacatctcaaaccatagttcgctgctctatattaataagttgggcatatttatgtgtgtacatgagggagagatctcacttaccagcagtatggatcttcccaaggagcacaatggccctctgtcctgtactacaggcactctgcccctttgtccagcattctcaccaccaccaccccacccctggctcaactcttccttttctcctgtcatcaaatatttctgtgttcatctcagatgggatgtcccaggctgaatctctggaaatgggaagggagggagggactggcaagactccagggagcactgcagcttcagcatcatgcacaccattccactccaattaccctttgatgtcatcaaatccactctttttgccaaatcaaatagtccacagcaactcttaaccccaagggtcctggtatcttgaaagctgtttctgcaggctcccacgctgctgccttgtggtctgctcctccctgctcctattttgacccctctgctgaggggccttcagttttactcttagcaaggaatccaggtacaagggtggtggctttggagactacacatccgcacctcccaccattcccatgtccaccatacttcactccttcactcctccaggctgagtatctgactgaagatctgtatctttgaggtcaagaactgcatcgcataggattttctccccaaagtttaaaacacttttaaaagcttgtgcattgattcaacatgtattagtacaaagttaggttagtagataattaagtgttacttcagaaatcacaaagtacatcatgagggaaacaaggcctattcctaagaatgtcagcactattggccagtgggacaaatcaaaattgacttcaagataataaatatattaatgcatatagaaatattattcccataattgaagcaatgtaacaaatttccaccaggcctggtcgtacaccctcatacatccagcacttggaaggctgagacaggaaggtccttgagtttgaggccagcctgcctcaaaaagtgaaagacccctgccccttagctcttaagtttgcctcctcctccggtcggcagctgatgaggcacgaggcggatgcctcgctcctgcgcctccccgatcacctggcaccgcgacccggggctggggccgagcaaggagcccgcaaggaggcacgagggcgagcaccaggtgggccggcacgagggcgagcaccaggtgggccggcacgagagcgaacaacaagtgagccggcctggggccctgcccccgagcccccgcccgatggggaacactcggtctccgcccccaaggtcagccatctggacgcagaggggggaattgagtctgttgtaccagacaccataccttgagaatatgctggtctggaatggctctgtgcctcatttgaaccatccaatagaaatgactctgtactttgcctcatttgaatgactctgtatttcacctcatttgaatgactctatacttcgcctcatttgaataaccttgagtagcgcctcatttacattgaccaatgggaatagctctgtactgcacctcatttgaattatccaatagaatccctgcttctcgcttgcgctttttgctatataagaacccctctcccttggctcggcgcgcttggcctcacagaagctaagtcgccccgggtacccgtgtatccaataaagcctcttgctatttgcatccaagttcgtggtctcgctgattcttgggtacgggtctccttctacgaaagtacctcttcgggggtctttcaaaagaaaagaaggaaaggagggaggaaaagagaaagaaacaaacaaacaaagaaattttcctgacaactggcaaggctctccagatgtccctctcagaaagtgaaagaactatggagaaagaaggattgtgggaactgtagttctacttattaaggttctgaaatgcctagacaactatagcctgttggtagacacctgtaatcccaagtactcaggaggctgagtcaggaagattgaaagacagaaggcagagtgagctgagctgcacagtgtgttcaaagtccagcctgggtaactcagtaaaacctgaaagagcttgggggcagcccagggccagagtgcttatgcagaatgtgtgaggtcctgtgttcagtccccagtagtcccaaccctccaaaaaagggtgtaaagatagcttttcttaacttactaaatacggcagatctttttaagccacccctacacataaccagaaaaaaacggccccagtttggggtcccgactgctttttcctaaagatagcttcctctgcagttgtgctccgtaggaacactcagacctgttgccacaaagtcatggagcctagcccccgtgattgctgttggcaatcgtcatgcttagcgccacaactctgggtgtttatttatcatagctcactcctcgatctctgcagctgcccaggatattctttcccatagtcctggaacctagatcagtgaggaggaaataaattgctgagatattgtatgtgagagtgaccaagattaaatttccctgcctgcaggatgtaccctgatacaggattaataagattacatctctactacagagcaaagcgccacctttaatcatttcccaagtgggcccagccacccagcctctactcgttaggttcctgaacaagaggaaaaagatcactaggctgtgtcagaggtcagaacaccttgtctctgaaggccttttccttacgaagggttccatgaatcaaagtaagggtatagccacctcatatttcaaacacgggaagaaggaagagcctgtctgtttgtaaggaagctgggcaagctgctcctatccagcccacatcaagtttgcaaggagtacctgttaagttgtagacatcgggaaacgaaacttaagtcagcacttagcagggtgaattgtggacatgacagtgaggtgatttcttgggttctccacctgtttatgagccgtggctagagggagaaatcagtctaccgtcagggtgccaaaacacatctcttgccctagtaagtaaatatcaccatgaacagggtctggagatagaatcttgcctcccccacccggggtgagaaataattctttccctctaggttgattcctgccctcttactgtatcaagagggatcttgtttgtttgtttgtttgtttcattttctttctatctggttctcattgtgtagctctacctggcctggagctcactgtatagacagggtagactcaaacacagaaattagcttgtccatgcatctcagtcactggaattactgcaccaccatacccagccttcaagagatctttcttccaaaaaccatagttcaggagttcttaattgctctgtctccagaaagagtaaactttggttcagtagccaagttggcctcactgcccatatttgttaataaagtttactggaattcatctgtattcatttgtttacatgagacttcctgctacaacagcagaattgagtagttgaaacacagatttcatggcctgtaaagcattagttattcattattcacccctattgacttcagtcctatattttctggcaaaatgttgaatgattatgataatggtcaatgcactattaaacatattacatgaacaatgtcattaaaccttgacttcagttatggcagaggtactttcgttcatcccattttccatgggaagtacccaggttttgtagcattaagtttctaggtctctgaagtggtgaagcaggattcaagagatattgttctgattccaacctgggttctctcaaccaggaaactatatctgtgcaaatataataacaataaaatgtagctccctcttactaggcacttagcatgcaccagcctttacatgtgccgtctctattgctcatctctagccagaatattctttgcaaaaatcggggaacagggagttaggctggttaaacagctcatcaaaaaccagaaagctcagagcacaagttactacatccaaactcaaacaccaaatctttccccttatataggtctccacactagaaaaaggtagtattttaagaaacaatacaggaactggaaagactgctcttacagaggacctgagtttgatctctagcaaccacgtctagtagttcataactgcctgtaataccagcatcagggagatctcaggacaagggtacttgtagtcacataaatataccctacacagatccatgaatgtacacataattaaaaacaattaaaaagtccttttaaaaaaagaaataacatagtatggaatggaaattcctcataatttaaatctcagtgcttagttctctatcctatttagaaagactatggtagctgaggcttagcacttagtgatagaggccctgggttccatccacagaactataagcataattttacatgtttacacacagacacacacacacacacacacacacacacacacacacacacacgatgctacagtttaaatatttgtaaaacttcaaaatatgttgaacttaatgcccagtatatcaatatcaaggagtcggggaggggagtgtcgggtcatgagaactctgccctcatttatggattagtaccttataaaagagctgggtacacttgggagaacaggccctgcaccttgcccaggcagcacagtagagccaaacctattgacagaagtgtgggttaaccagcaccaaagttatgagcatgagagagctatccccattactcttctgtcatgcagaggtgtgggccttaccacttacccctaccacctgtagtgagcgagggagtggccctcccccttaccagttgcagtactcaggaaaatggaccctgcaccttgcctgggcagcacagtagagatgaccctactgacagggatgcaagtgaactacccccaagaacatgagtgtggaagatctggccctgcacctcatctgccacatagtggtctaggcatgggagagccaaccctgaggacatgaaagcagaagaaccagccccgccccttgctcatggctgcaaagggtgaaccagccagggtaacacaggagagtgcaccctgatcatgaggacaagggagaactaccaggctgacccaccctgcagctacacaggcccagaaccagtgttatgagttggctcaccccaacatttaccccatcacaatcttctggagcatgtgaaagggctggtgctgcagacccaaaactgcaggacctccatgacacaggacaataacaagagagccaagcagagtcccagtgagagtccagcgtcaatagtgcagccaaaaccaggggcctccagccagaccaatgactctttgcaatgaacacttgcaagtaaagctatatggataaaagggttcactatgtgactcactgtgtcacactacagcttccatgatgagatttttcttttttttattttattttgggtgggggcattgcaagggcaaagggtggatatgaagggacggggaaatgaatgagatcgaggttcatgatgagaaaaacacaaactaaataaaaagaaagctttacaaaaggagcgggataaacagtgaggcctatattctgcccttcccgcactcccctgtgtgaacatgcagcagcaagccccatcgtggaggcaaacaacagccctcattggacagagattctgatgacacccaccgtgcttggggcttccagccatcagggctgtgagaaagtgaatttctgatctttatacaattatccagacccaagtgttttgttctagcacagtgcaaccaggctaagagagtcaccacatattctctgagcccacacttcatccttagctgtgtgagtggcctcaagtagctaacttaaatctcttcagccctcattttccttgttggcaatagtgaggagtcttctcagatctcccagactcaagcattgggagctttcagtttgctccctcactaagtcactttcactcagtgcaaacatactcataaccagtgtaaactctctaaaaacaaatcaagccctaatcaaaataacttacctggggtggggagtgcagctggagagatggttcagcagttaagaatgcttgctgctcttgcagagaactcaagtttggttccccacacccatgtcacacacctctgggagatctgatcccctcttctggccttcacatgtacctgcactcacatgcacatttgtgtgtgtgtgtgtgtgtgtgtgtgtgtgtgtgtgtgtgtgtgtgtgtgtgtgtgtgtgtgtaaaaaataaaacaaaatgttttaaaagatttaagctggggctaggtgtggtggagaatccctttgataccaactctcaggagacaatggcaggcaaatctctgtgagttagaggccagtttggtttacatggtgagttccagaccagccagagctatataatgagaccctgtctcaaagtaaaggtttaatcagggaaggggacagggacagaacagaggaaggggccaaatgtgtaactaatttttaatataataaaaaggtggtatttgaatgcaggctacctgtgtaagtggacaatgctttcccagaagatgtgggctattccatgagcatctcagaccctggtgtgggataccactctgcaagttattggtcaatgaggccccagaggatcccaggatcacacagtgggcagcagataatccagagattcataactagtcaaaaaggctgagaataaatgaccatgagtgttggttaggtcaaggctcaggaaagatcagggaagaagaactggaaagaaagtatgaaactgaggatcgggaggaacactgtgaaatgctgtcttctgggcatccatggctgttatattcctgagctcattgcagctatgatcacgtgacaaatattgtacaagtcaacatcccagcggacagcaagagggggtagaacgtaaaggaaggaggggacatgttaagagatgtccagggggtgtaaagggaagttgagaggcatatgaccaagatataatgtatacatgtataaaactgtcaaagaataaataaaagatattcctaaaatgaaaataaacttgagaaactctgaaatatttaaagaataacaaagaactaaataaataaaaacaaaccccaggtgtagtgcttgcctataagcagtgctggggagccagagataagtagatgcctggttttcacagccagctagcctggcctgcttggtaaggtccaagccagtgagaccctatctcaaaaccaaggaggaaggcccctaaggaaccacaacaaaggttatcttctaaaatactgatttggtggaaattgattgaacactagtcactcgcaaccaggtaagagggtggatggagtagctggatgtcagcaacaacattcaatttgatagtaagaatgagttacagtagtctattgcacaatggtgtgtctacagcttataacaacatgatatattttataaagaaccagaagatttttaatgctgccaacacatttaaaaaaaaaggcaatgtctaaagatatagaaatggcaaacattagccaatgagatggctcaaaattggtaaaggtccttgctatacaagccaggtgacctgagttcaatctggaatccacagaaaagtaagagagaactgactccacagggctgtcctctgatgtccacaaacagactgtgaacacaaaggcacacacacacacacacacacacacacacacacacacacacacacacacacacacaataatctagaacattgaaagaaatgtcaaaacccagatttgatcatcacacattgtgtcatacattgaatagcattctgtgtaaaacagtgtagagggtggggatgtggctcagtggtccagtgctcttaaaagggtctgtcgtgaggagagaagtgcccagaaagatggctcagagaataacagctcttgccatgcaaggcagattattctggaacacacggtggaaaagattcctcaaaattgtccacacacacacacacacacacacacacacacacacacacacacacacacacacacactttcctttctcttaagtagtgagactttcccaataagctacttgtatctgtatcttatttcctaaccccatcatcattctatgtagattaccaaaccttaaggaccattgaagtcatctgagagatgtctatactaagttaaaaagtgatttatccagaaaaaaaaaaaaaaaggtttattaacattgcccttgagatagagcaccttaaatagcaaccaatagactaaggatacagtgaggttggtgaagtgcttgcctggcatccacaaggctctaagtttgatccccaatccacacaaacagggcccagtggtgcatgcctgtaatcaaagcactcagaagataaagacaggaggaccagaagagcgaggtcatccttggctacctatggggcaagtttcaggccagccagagctatgtgaaactctgcctcaaaataaattattttgtttgtttgtttccctttgctttactttaaatgatggcttgtttccgcctttgctttagctaataggcaaaactgatgtaaggaaacacttgcattgagtttacttctttaagtggcatggtttttaaaaaagaaaaagaaagaaaaaggccatcttgccaataatccctctaagcctttttaattgcaagattcttttttatggtgtcgttgacctagccttagcagagttcactctgtaaatgtgctgaagagggtaccagagctgacaactaaggctgagaaatgttctaagtatcacgactccacatttttctcctgtccatgaggtgcagggactcatcctgtctgagtcatgcctgccctttgtttatgcatgaataagacacttcagacactgcggacaccagcccttccaggaaaaataagacctagcctcaaatcagagtgagagcactgactgttccccagtgccaactaatttttaaatgtgactaaagacacattgctagcttcctccaagtcgcctactggcccctaacctttagcaagacaaaaatgtcacatataatggagcctaaaattaaggacacatcttgcttctccctggatcagatctcgtgagaatgaggtcagtgtcctacctctgccagataagagcagtcattgcatgagagcgttcaacagtaccacagtcattaggccacagaaaatgtctgatcgcttaaaaactcagactatggatccagaatcaacctacaaaaagtcattcagccttgtccctaaattcctgatagggcagtgtgtaaaacaactgttcccgggtcacacaaatcacttcaccagtctttgctccctcattaactgataaccatttcttaggtccctagttattgacacagtactattctcagtgttgggggtgttctgaacacactagacaaatccagagtgtaacagactttaccttctagtggagaccggcaataaacaaaggaggaaaatgaacaggaagagttggtgctgctttgatgatgaaacaggggcttgtactacaaaggggctttggtgtgagtagtcaaaaggtgttcccatgagctggagatgtaggtcagtggtaaagaacttgcctagcatgtgaatggccgtaggttccaatcagcagcaaaaatatattttatttttgattctatataaacatgaacatccatgtggagatgtgctcccatgagttacccatagaaaccagaagaggtcatcagacagcctgaagctaaagctacatgttggtatgagccatttgatataggtgttaggagtcaaatttgggtgctctgggagagcaagaagggtccttcatcgctgagccatctctccagaccctcttttttttatgacccagtaagtttaattaggggtgctgggatgtacgtaggtgtgggtttatttactagagcttagatagcttgccagtggctacaccactaaagaaaatcaattcttcctcctcaagagccattaacagcctcctcaggggggttgagattctgtttttattatcatatattaattctaatagctagctttattatgacatgctcatgcatgtccataatatagttcagtcatattcaccccaactcaccctgtccccttccactctgaggatcacctccctcttcctaacctgcccctcttatactttttgtatttcttttaacttaaatttcttaagaaacagatggaaagaaatgaagaaaggaaagaaatgagaagtctggaaggcaggcagagaccacatctcagaggggccagaagacaagtgaggactccacttagacctacttaatacaggatttacagggaggtttttcaaatgggtgccttgtggtctagtgggctattagtctggatctctggttgccatagaggatgtggattgcaggaatgtgaaatggaagcagggaggccactcaggaggtgatggtggtggtccagatgaaagatagtgggatcctacagaggtgatcactggtagagatgagggatgttcagagaaacattttagagactgactgactgactggcaggattcactgatggaattgctatggggatggcggagacagggatggttctcagggttttggctggctctaggcacactggatcagcttacttggcatctgaaatggtgatgtttcagccaaatggagcccaatgcatggccaactgtactgtgaatttgaactacatctgaggaaagtgatatgttttgtaaattgtcaccagagaattatttcccacacctccaccctctcctacatagcaactgtgtgcctgtgagcacagctccgtgggagtattcctaacctttatttatgaatggacattgaaaggacattgagtttctgcagcctagaagcccatgagctacaaagtgagctgatgaactagcatttggttaaagagaaagtacaataagcaccagggacattagctatagcagtccagaggactgtcaaagacctacaaaaagaaaacctagacatctgagtggaacattcagctataaactaagaggccagatttaatcatctacctatagttgtcatccaagaggactgcttcttcttgcaaaagcaaaggctcctgctcctatttttcagtcaagcaggtgctttgaggcagctaaccagctggctgaaaccttcaccaaagcaaaagctagtaacatgattgattaccctctcgttgaatgagaaaagaatctctcccagccaatcagcatgcagaattgttaacaggttattgctgacctaaatgatacttagagaagatgacagaggtgcccacatcccaggctcaggttggctgggatgtcatctaccaactcagttccacttaatgcactgattttttaacaaagctcagttagctttcaaattgctaagcactggctttcaacttcagactttgaatagacaacctctctctccatcaatcattttaatacatctgcttcagagttgcaatccatctgccccagggaaggcttctcctccaaacatctcgaagcttagggttctagttggctcacagattcctcctctccatccctcttataaaagatgcatgcatacatctcacttcatcctaaactcacaatcaagactccacgtgactcctttttatgttgtcatgcacctcaacactttagcaatgagaaagatggtctccttgaagaaccatcaagtcagagtttttttacacaggaaaccactaagtaagtgtaggccatgaggcgacacttggaaatccagtgggcttcctacttgtgttgtgacttctaagggcatccatctatgattgaaccatacacctatcaggcacgtaaaactggggatcatgcgatcatttcctgtgctaggtacaagccaggtgaggcaggaaaactaggagttccaggccattttcatctatgtagtgtgctcaagaccagactgggctaagacagaggatgtggtgggggtagactcttctaagctgtaaacaaaggtttcaagttcctgttgcacctccctactttccacacttaatagcaatttctagttcttcactggttccatgttggatgttgaatgtaattgacccccataatctcatagggagtggcactgttaggaggtgtggctttgttggagtgggtgtggccttgttggaggaagtgtgtcactgtgggggcaggttttgagatctctttgctcaagcttccctcggtgtgactgttagttaacttcctgttgcctgcaatatatagaactctcagatattcctctaacaccatgtctgcctgcacaccaccatgctccccaccatgacaataatggactgaacctctgaaactgtaagcaagccaccccaatcaaatgttttctttataaaagttgccatggtcatggtgtctcttgacagcaatagaaactctaagacacatgtaaagaaagagctacaaaaaataaaacaccagacacaggcgtagaaggcaagtgagataaatggaaatctcatctaagtgtcaggtagctccttctcaaacacagtaatagaaccgtgtccctcttcctatcacttactctacaggaatgtcacttttccttcttggttattgctagtgttatggcttgtaccatttgctgttagctatagtacttgaacttaagaaggcacttgtgtcgagttgtcacagaggcaaaaagactcaattcaccacccattactcttaaaaactctccttccttccacaaacctcaagggaaaagccaagagtcatcttgtcatggcgtaaaactctttccccttcagctaaaggttaatttactcctaaaaactgaacatctgggcactagagggatggatcagcagttaagagcacttgctactcttgcagaggacctaagttctgttcctaacatcttcatgatggcgcatagccaactgcaactccagttccaggagatccaataccctcatctgtcctccatagacaccaagcatatgcatggcacacatacctatatgcaggaaaaacattcatacagataaaaaattaaaataaatgaatctcaaaaacaagacaaacaaaagaaaagccctgcacatcagacttaacaaacatttccccctgggctaatgctacatttcagtagcttgttcatgtcctagcatgcatgaggccctggactctactcatagtaccgacaacaaaaaagggaaaaaggaaagagaggaaaagagaaagaaagaaagaaagaaagaaagaaagaaagaaagaaagaaagaaagaagacaagaacaggaagtacacttccacttcttatccctaatggagagagtagtgggcagtttgcagaaatacaggagtctggagagatgatcaactactaaaaaacaatcattcaaacacaacattgaagtttaaaatgtttcttaaggtttgtctcaggttaaagcttgggatgctaataacgttgatcttgaggatggtgatggtgaagaaagttatgtgaagataacacaggaagtgctgggttagaaatgctatcccagcctggagatttgagcctgaagattcaagacaggaattcaagcaagtatgggagggaagggccagaaaagggccagaagccaggtgtgaaatcacaagtgtctcaggttctctgactctatctgcactctatgctcccaggcaggaacaaaatacatcttgtgaagaaatgtaatgccagtgacaggagaggaatccaacattcttaagacccaggggaaccttagctcagtcatgagattccatgcataaaaacgggtgggagaaagccacattgtacaggctctacaaacctgtggtatgaggatggtggctctccttcctcagtgaacaaaattcaaacatggttctagttcatgtaatgaagacaaaggagaatgcagaagagcccttttgtggttccattccacagcgccaacatccattacattctgtcaattttagaaggaagtgaaagggtggggagagatatggagggagggaggagagagggaaggaggaaagaaaagcaggttaaaggacacttataaaattaagaaaatgataaaggggtggggagataactcgttggatgaagcatgagaaccagaaactatataaatggcatcctgcctacaatcccgaagtggtgagcttcaggtactgtgagaaaccctgcctcttctttgaagagcaatcaaagaagactcccagtgacaacctgggtttccacatgcacacacatgtacatgtatgcccacacacacacacacacacacacacacacacacacacatatatgcttgataaggaaggaagggaagggagggatggagggagggaggggaggaaggaaggaagagaaagtgacagggtgtatttcctcaatatcttaacaaacctgcagtgatcactgctgctctctgagcttctcacaccagctaagtacacaagaagaatgaagacaaagacctgtgaacaaatccagggcccaagagcaaaaccagaaaagatctgaaagccaagttccttcaatacaagctaaataacctaagcttgttggcaacaccacttgggaaaaaccctacacaagttcccaattgtcaacccaactgcagcctgtggttgaagatctgtgactccctggccagggtgacccttcaggagttccttagtaaagggcttatcaaactgattgcaaagcacaattaatttatatcagatatacaaaaatgcaaatgccccagctataaatgcatgagcaggaggaactcaccccatgtttacaaatgtaaacctcctaagaatgggaaaaggtaagtgggggctgatatggtactaaagtataacatccaagggggcccattagacaaaactgagggtcttaactcaggaggagatgtactagttacttgtatcattgctgtgaccaagtatctgacaacaagcaactttgggtgggaaagaccagtgtagggaatgatgacacccacattttgagtggctcttccctcttctgttactcctctctggaaacacacagacatgctcaggggtgtatcttataggtacactaaatccactcaaactgacaatgaagaaaaaccatcaccagcaacaagtggtgggaagagtcacgtaaagtcctcatcactatcagaactgtctgggcagttttctcaaagtcctactcttctcccccctggagatctgaacatcaacagagagctgagaatgcagacagatgtgcagatgtgggacgtggaaaagtctagatgcagaagagttcgtttgtttctgtctgcagaaccatcatttacacatcactgaactgtaacaagacacagcatacacaggcattggtgttttctaagggactgttctgaaggacttgcactctaaaattattcatattgggacactgagagttattaaacaatgcttctcttgctgacgagactcaccacagccctgaaccagcaccccggtataagctacagacaacacaagaagggaatgtaagaactcaacttttaaaaactttttttccctaacatccaaggcaggaagattctgttatgcacaaacacccacaagttttaagaaaaatcgccacagactagtggaagaaggtgctactgggacaggacaggatggcaaagagatgccaggaccccacacacacaagaaatatggccagctccagcagcaagctgttattgcctcatggagaggaacacttgccactaaaggtggtttgtcaccgcaatgtccaccacaaagaggcactgacctgctcccttgagttgaccctgtgtgacttccatacctttccccagccatccttcatgggaccacctcaccacaatctcgaaacactaaacactcaaagttgctgcctttccccaaattaggtaaggctgaacagtggtatcagggtgaaacaaccttactggagtccaaatcaggtcccaacagaacggtctaaaactgctgactgactcaggctcctcctggtcactgttgttccttcagcactttctccagccagcacctggaaacttttagaactttggtgagtgtttgtgcatgccacaactttcctaacctagattcaaggcacagcagtaaaattctggcttcgtttgtttggtggttctggaggttgaatttgggtcttcctatgtgctagacaaatcctaggcaactgatccagccccatgtttttatgttttgttttgacatggggacactaagttgcacaggctggccttgaacttgtagacttcctgcctcagcctctagaatagatggattggcaccaagaagttgactccttataccttctttcttgttctgctgcctgtgtgctacccatggtgtgtttacattgtgtagtgtgtggtatatgatgtatagtgggttatgcatgtagtgtgtagcataaggtgtgcagtgtgtttggtgtgttcgtatgtgttgtatatgggtatagggtgaggtgtgtggtgcatagtgtggtatgtgtggttcatgcattgtgtgtttatggtgtgtaacatgtttcatatgtggtgctacacagcttacctctgtctttcattgctccttgagcattcttttgtgatgagaaatctgttctgaaagaaacaaatctactcaccctcgagatctcatctccatcaacttgtgacaagctaagtcggtgtctaacaacctgaggacatctttccccatctctaggcacatgtgcacacatatacactatacgaacaatacaatgcacaccacatactacataccatcaacacacacaagtagcatacatcacacataacacaccttgcatacacaattcacaatgcacagtcccacacacatacagcaacagatgccagatacatatcacaaacatacaagataatgaacaacatagatcactaattaacacaccacataccacacctaaccataaacacactacaggccatacatacacaacatataatgcaccatagtctatacacacaacagaaacacactgcaccatttacacaaacactatataccacaaacatgcctcattcacaacacacacacacacacacacacacacacacgtacacatgtagttccttgttgctttcatttgcatttcctccccacctctcttactcctttagtgattaaaagctaatggatttccccttgggcacctagaaacagcagcacccttctttcacagttgcctgatctgtcattattcaccctcacacagtttgttttggggcggctcctcagcaagccagctgctttgtgaacagcttcccatttgccaccaaccactggatctgatgggtctgcaatgagctactccctgtacagactcactaagaacctgaagtctgtggcagtgtctccagaagggatgtctggaatggagaaggggggtgtgtgtagttatagtaaggcttcagaccagctgaggggaggggaatgctgatgaggaaccccacacagagcttggcagagaaccttttccatttggtgtccactccctgaatcttgctgctcttggaggactggggagtggcagactcttcaggccttcttgtccaatgagtgacctcaacgctgttctgtgatgtcagatctccctcaaagttactgagagacagtcccgggacccttccttcactctcttttacttaatttttgttttgagaaaagacctctctaagttgcccagcctgggcttgaccttgcagaattttcatgaacataagaaaggaggggggattttgattagggattcaaatgaaaatatatacagagcaatttttgtttgggggttttggtttctggttaaggcgtgtgtgtgtgtgtgtgtgtgtgtgtgtgtgtgtgtgtgtgctgtgtacacacacacatgcatatgccatgccccaagtgtggaggtcagaggacaatgttcccaccttctaccatgtagttccaggaattgaactcaggttgtcagacttggtggcaaacacctttactctctgagccatctctgagtcagccccagaactaactttggaaaagctgtgctgccaagacctctggggcatgggttgaaaatgttcactacaaatgcatgctcacactatcaccagagtgagaaattcacacagaaaagaagggcagaggggcttgggttgtagtgacagttgagtgcctgactaggatgcagaagaccctggattcataccccagcacaaaggagggataagaaggaaagaagtgtaaaagggagggagttagtgaccatcaggaagctatggagatatcttgcttaggttgggagaggaactagaggccagccatcatcccctgctggacacagatagcatcttccttagccttgatcttagctctcttcatcaagtggggaatgcagcctggagaggcagaggtatcccccagagaccagaatccatgttacctcatttaggagaaacagaacttgttccctggacagaaggaggaaggaggggatgaggggacattgcaggtagagagacatatcctagaccacatgaatcactacttcctgtacattctattccaggaaacaaagcggaaacacttctcttatctgattgacagtcactgctcagtgaagctcagactctaaacatgaagacatgcccaggacgacctttgacatcccttttgtaaatgaactaagtatggaatgattacttaatattatggaaactggtaaaataccatcaaattctggaaagcaaaaatatcagcaaagtaaatgtgtcctccttgagaaaacacagtaataaaagtcaagtgttagaaatgggctggggagatgacttggaagttaagagcacttgctgctcttagagaggaccaaggtttgcttcccatcaccttcatgacagctcacaatcacaaggggattcaacggcctcttccgacctcctccagccccagagatgcaacacatgcacttgcacacatggaggccaaatattcattgtagggaacagcaaaaacccacagtgtgtgctgttctgagtgaatgggcacagtcgtgtcaaggacctcatagtctcaggctcagagggaccaagtgtgagcgttgacagtgtgtgcagagaatgtccctccagcaacagttacagcccaaagactgttcccctacagagattgcttcctgagatcagctaaccctgtcttcttgaccagttgtagaccataaaccctgcctccttatttatctgcacacaataacctgcatccgtgttcaattgtgtacagtcacaccacctctccattcaactctgtataataaacacactaagcttctagggcactgtgatctctctacagaggtctcagaccattgtttccaggtttcctgtgtgtccgtctgtctgttgtttcttcattcccttgctgtcctggttaggtctaagtccgtgctaggatagagcaactcaacacataaaatttaaaaattactaacctaacttgtcacaagtacaaattcaaggacctgagtctggatacccagcacatataaaaaaattatgaagggtggtacacaagcctggtgctggaaggagacagagactgaaagccaggacttgcttaccagccaatccagccaatccagccaatcaatgagctccaagttcagtgagaaaccatgtctcaagaagtaaagtggggaaaaaacaagaagtaaagtggagagcaatacaaggcaggtgatattgacctcaggcctacacacacacacacacacacacacacacacacacacacacacatgcacagacctgcacaggcacacacgtgtgcacacacacacacacaaatggcttgccacattcttctttaaaaatttttaggggtggtggtggtgcatgcctttaatcccagaatttaggaggcagaggcaggcggatctctatgagtttgagaccagcctggtctacagagcgagtgctaggacaggctccaaagctacactgagaaaccctgtctcgaaaaacaaaaagcaagcaagcaaacaaacaaaactgggctagaaaatcttgttttgatttctttgaaaagcttcaagacttgtctttatttggggaatggcagtgtaatagggattatcctagtttttcaaatcacaaactatttgggggcctctaggtagatctctgtatctgggagcatcactgtgaaacaagcaggcttcagaatatgacacctccaaaatgtggaaatgaacatattctcgccatgccaggcctgcagccaggcgcatgccattcactcatcaagcaggcagtgaccccactacatcacagacggcatgccaagagttgggcacagcagagtggaaatgacacccaagacacctgcccctcctgccactgtgccaagcaatcagtgtgaggaaccagccatgaggccacagcagcagagatgtcaaaagaaccgtaacagccaaatattaagttttagggattttatttgttctgttgcagattttctgtttttctaatctcacattttgcaactgataaaccaagagttcaccaataaggtgccaaaaagcacatcaaaatatcataatcaggatatttcagcccttttgttgtctgtcactactaagaaagggattgaaattaagaataatctgggaggcagataaacaaatatacatttatacatatacacagaaaatttttcttcttttttcttggcatgcgctcatgcagtccaggctgtcctcaaactcaatgtagccagagacactttgaactcctcatcctcttgcctgtgactctcaaatgcttatattataggcttgcttttttaccattaattttaatgtctatgagttctgtttctcaggcaataccaagggaaagttaagaagcaggagcaataaataaataaataaataaatgtatttctgtcctaccaatattttattgtcacactctccaacaggcaaatgtgttttaaatgaaagatattagtcactggttctccccttaacatctcttcccaatgaaggatatttttggtaaacttgtctctctaacctgaagattctgtcttgggcaatcaatgagaaaacattttttgacaagtcaaatgcctgtgattaaaaggagaaatggccctttctgtcgagaatatgtggcttactcatcctcagcccctcaagacatcaatctgcatttcactgcagacacagcccaggtgtcttggtcaatgcacacattaaagacccgtcctctgctgcttaggagagagatttaacattagctcgggttagatgtaaaggaacaaccttctccattgaaagagaaattttatttctcggggagaaaaaaaatacagcaagcagtcactccaatgcattatgaacctgctattgcgtgtgggatttatggtcgaggtctcttctctcctgtaaggattcttcacctctaaaaggcagaattaaagatttcagagccatccaaaagtaaaagtttcatggaccttcagtgccatctagtggtcatattctgtcatgtcccaccattggtttcctctaggaatttgaagagattgagaggccttggcactgaaaaatccgagagttctaaatgggcttggcagtaaccagcgttggcccacaccagaactgttgtgcctggaaacagtgtgctggatgcatgacatttccatactggctcccagagagagctgcaaccggatctcatggctgcccctgcttagtcatctgctggaagcaagctgtctggagtacattgtgtgtgtgtgtgtgtgtgtgtgtgtgtgtgtgtgtgtgtgtgtgtgtgtggccacatgagggtagcctgaaaatgctccattggcaagtggcatcaggaagggacatatgcaaaatcacagtacacacaacctctaaatttaggtaatctgtcaatatcctgcactagagagggtttttttctctgcactatggctcaaaggcttaaaaacagaagccagtgtagactgcatgaaaggtcaggctgttcagggcatgacagatagcagcttctgcctttgatggatggtgacctcccagcctcacgggggcagcacctccatctcaccccttcctcttcagccctacatcagaaggcacagaagccaagtgctcagaggcctgagaacttggcctatggattccccttccttttctgtcaacctcagcagccacattttagcttttgtcatttgaatcttcaatgtctccctaagaatcacattagaattctaggtcccaaacctgtggcactgtggagaggtggtgtaacctttaaggagtggggtctagtgacaggaagtcaggtcattgggagcattccctcacaggtgctcttaggacgctgtcctctcttctccttcccaggcttggaactggacctcttccactatgtgttcccgccatggagtactgtgaggcctcaagccccaaagcaaagtggccatggatggaaaccatgacacccaagccaagcctttttcttagaaattgttatcttccaacacagtatctgaaagctagctagcacagtggccctaagctttgaggggaaggtcaaaaagaacttggatgtagacagaaacagattccatgacactccagccttttggttttctgagggagttgggagatgatgagaaaccattgttggcactgtaaggctcagaacatccaggcccaaaagttcgagtcatgccaggcttggagatgctttcaagatccagctagtggctgagtgtggtcacaagcaccgcccctacttccatcaaacagaaagaccatgcaatcagcaatcaccgctgtttcattctgtgtactatttactctcatcaccctatgttttaataaattattttctagtatatgggtaggatagatatctaccactcttcattctctgtctatctcatctcttagcagattgtatgccttcccataaaaaggactgtggcttcctgattaatgcctgccctgaaaagtagggcttcttaaaggacctgctcactgggttgctgtgacgatcaagtgtgttggcgtacgttaaatgttcatgactgtaccactaacaaatgtcggctgtagctactaaaactacgagcaaaaaacaagctgggggagacatggatgacttgctattcaaaaagcctttctgtggttgagtgagtatatttgcttccagaaaatgcatgtctcccttctcagaccttaaactccttgagaaaggtgtggtatcatttggttccccctaaggataagcctattacaaacactttgataaatggatatagtatcaaaccttctaaactcatgtctccatgcccataattggtgcagctttcagacctcatcagagaactttcttttcgaagtgaacagcagttaacaaagatgatcataactgttcaaagtcagagactaaagaatgctcggtcacaaatgggacatctatcacatgagtgcacatgcatgagtacatgtgcactcaaacacacacacacacacacacacacacacacacacacacacacacacacctcagaactagcacagaagatggggatggaagatttcaagagccaggggtcaggacagagcaaaagcaaaagagtgtctgtggacatgacaagatcattacactcaacgaactcacagcaactgtgattcccttcactgcaatctgaaggggatcaagccagtcaacactctagcatggattgggaagaggttcatatgcccagcgctaactgaggagctactggcagttgatggcttctgggggagagagagacaattctctttaaaggtgtagctcctgatagatgaatgacactccagtgggtagaaccacacccataagtatatgggcaaaataagctggactcagtgggttaattttattttagtgaggacaagagtgggtagatggatgagggtctgggaggagttagaggaaggaagatgaggtgaatatgattaaaatacattgtgtgaaattctgaacaaattaattttaaaaattaactttgtgggactctacagccaccaaatcccacccacaactcaggaggcaaagaaaattggaatgcaacaggtacctaaagatccccccttgaggatcacaccaagaggcccctgaggccttcagaagaagaagcactcactgtcagcagtagtcttcacctcttggaatttctgaaaacccttaggaaccattataaatgaatgccttatctttcggggcagaaccggaatttttaattcgatgaaaataactgaacagtccactcaggagcaagattgacagaccacaggtgggaaacactgattcattattcatcttttctaggaagacaagcagtttcagcttagcaagatgaaaatgagaagaggcagagagaacaagcaagtgagattaaaaaaaaaaaagatggaggagtgagcagatgcatgggtggaggagagataagttgattgatgggtcaatggaggaaaaggtatagatgataggtaaaaatagatacacagaagaaagataacttacagagaagtagaagatacatagatgatttgtagacatataggtcgatagatgacatatacatagatgacagaaagaaagaaggaaaaaaaggaaggaaagtaaataacatgataattgatgtggaggcagattataaacatagatgataggatgtgatacagatgataatgaaagatgatagataaatgatagatgatagatagatgacagacagcacacagatacattcatatatgcctgcaaatacacactggtacctagtccatagtgaactagatcatcagagcactgagagggaacagagcaagagacccagtaaatcagccttttgttcctcatctaagagacataatggcatccaagactccagcctgtgcatcctcccctgaaaagctcattgagttcagtcgagatcctgtccttaccccagagctcttgggaaaccttgccattaactcttgcaattgctgcacctgcttgttcactcctgggaaaatgtcaagatctttctccttttgtggagcacaggctacgaggaaggcacttttctttcactgagactttttcagaagcgcttttttttttccccttcctacaattccacagattttattttagacacactggaaagcacaaagaggcattcaactcagcctgcagattgctagaaaacccttcacatcccacggaaattagagaggcagccgcactcatcagcagccgtgtataaatctggaaggagtgatttcatagactcagctggtttcccaacacgaggtaatgttcgtccaccctcttcggctccaggacgcaggcccaggcactcagggtctaatctctcactactcactgcctcgtttttctcatttgtggagcagaaacgggatgcgccggagctaaattaccagcaggttggcattcaggggctgtgctaggaaagagacaatgtcaccgctttccaaggccgtgagccccagctgccaaacctttcatggccccgaagtgggtcatggaccaaagtgagtccagagagctggcctggctgctcccaggccacggagtgactgcaattctgagtgttctcttgacaactgcatgagacacacactggtgggcagacggtgtggggggatgtaaagagggggagaggaatgcagatgtttgggaaacatctttgccaaactgctagaaagcacacaggaggtgaccctccaggacctgtactaggcattcagcctttgatagcctcagtactataaagtatttttttctaacgactcctctgaggaggttgctgggaacagagaacaagggaggggagaaaatagagaggaggtaacacaagggccactgcgcacagaacctgagatggagcatccaccgctgttccacagggagccaagtctgcagaagacagaggcatgggctgagggggaacttctgggagcagccataggagatgcaaaggatacggctcttaggaaggaagataggaagatgccttcaggatggggatagagctcaggagtagagtgttcgcctggcatacacacatcactgggtttgttccccagcaccacatacactggatatggacataaactataattctcacacttggagatggggggcaagagtattaaatccaaggccatccttagctacatagtaaatttgaggccagcctgtgttacatgagacccctgtctccagaaaataaaaaggaagagagaggggggaaggaaggaaggaaggaaggaaggaagggagggagggaggggaaaaggaaggaaggaaagaaggaaggaagaaaggaggtctctcccagaaggccaagatgtctcagacagctgatccaatgacacaaagtgatagcaaaagacttcattttcaactaactagaatcacacaatgggttgtctagtaaagaatagctacaaaaataaaaaagcagagcactaggttctgaaagaacaggcaactcccagggcaacagtcttcccaagagagacaaaggaaaccttcaagaagctttagggaccaatgtaaaaacaccaagtgtctgcaggggacacaggggaatgccagttttctaacaggagcagcaaggtcacggaaggggagaggagagtaggaatgggtacagaagacagctctatggcttcagatctgaagtgctcccaaaggcccatgtgttacatgtttggtacctttagaagggagcagaaccatagagaagtggcgtctgggcgaggccttctgtcactggaggctcatcctaggaggaggctgtgagatcccatccctctccctcccaccccccctctctcttttcctacccccactttgaagccaccatgaagccagcagccctcactaccacgagcttctcccatgatgacccaaaagcaacagggtcaactgtgaactaaaacccccaaatgtatgagccaaaataacttctataaactgattatctcaggtgatcttaccataatggaagctatacacaaatgtcctaaaagagtaaaatgtattcttctccaccctctccaaaaagtataaatcaaagtttaaaataagactggtaccttgaaagtgccagcatggagctcttcagtggaacaattaatataaataacttcctttcagtttcatctctactgtcttagggtttctattgctgtgaagagacaccatgaccacagcaactcatataaagaaagcattagttggggtggcttgcttacagtttcaaaaattcagttcattatcattatggtagggagcatggaggcatggaggcatgtgtgctggagtgtagctgggtcctaaatgactccctcaggtgaggggtgagaaggcgagacttcaaggcacagacaccaggagtcagttaaaagggaaacagcagactcatttattcagcagtggggagagccaatgaggagtaaccacacaatgtcctcccagtgaccaggctttgttctgatctggtgacattgtatggttactcctcattggctaggcatgatcaggacctctgacagcgcctgttgctaggtcctcacactcatctctcagccttgtaggccttatctccctacactagagctgagagtcctacatcttacaggcaataggaagtcaactgactgtcacactgagggaagcttgagcgaaagagacctcaaagcctgcctccacagtgacacacttcctccaacaaggccacgcctcctaatagtgccactccctttgggggccattttcttttaaaccaccacaccatcttagcgataagacaacatatgcatagctctctccactaagaatggtctgggcaagggaaagtggtgtgattagtcttcattgtcaactcatctggatctgggatcatgtaggagccataactacgggtatatctttgagcccagcctttcccatgtccagatgtctgagaaggaagagccaccatgaatgtggacagcactgtcccatgagctgagattccaaaatgacaactatatactcttaaactgtgaaccaaaataaattgttcttttcagttgcttcttattgggtcacagcaaagagaaaggtaactaacacaaaggaatacacagacagaatcaaggacaaagagtaaagaagtcacctgactgctttcagcattggaggacacagacactgcctctatgtggcagtttggatgtcccccacaaatctcaggtgtctggatacttggtccccagtgctggctttctgaggaaaattaggaggtgtagtcttgctggaggaagtacatctctgggggctttgaggtttcagaagacttacaacattccagtgtgctctctctgcttcctgtttgtggttgaagatgtggatgtttccagctccagccacctactgcctgctgtcctggccatcacagactctaaccttctggaacccaaagcccaaattagacactgtcttctataagtaaccttggtcatgacgttttatcacagcaatagaaaaggaatgcctacgctcttatccaggaaaaaaatgagtgactaagtactctgcccagtgcagctggcaactacaatggcatttccagtgtaaaacaaacaggaaaaagaaaaaaaaaaaaaaaacagcagcctgcccttagttttgtgcatatacttggggtgtagggatattggaaccaatacaaaagacagagacaaacacacaaccttcagaagctcttatgtaaagcagttcccatgaggaatttcagggtccctggggactaacattaagcgtctaatatccagaaagattaagggatagtgctgaaaggttcagtgagtttatccattctagcatgtaagcagcggcctcatcagacctgggtagctacaacaggccagataaaaacaaaggacccaggaatttcccatacaatttaagggcgggaagacagactgggttgtgaaccactgctatataaatgttacaaagtacatttggctctctgctacatctctgttgcttatttcccttgtgttctgtgtcccagcagtgaatggcattcatgcaaactcttgaaacagatgttcaggaaactagaaacctagaagaagaatctcccacactaccttggtgttctggttaggtttttgtcgacttaatccaagctgggtcatctaggaagaaggagcctcagttaagtaaatgcctccataagactggactggaggatagtctgcaaggcattttcctaactaatgataggtgtgggagggctcagcctacctgggtgtgctacccttgggtgggtggtcttggttgtataagaaagggaatggaataagtagtcacagagggcaagccaggaagtagtgtgattcgtgacctctgctgccatctgtgcctacacgttcctacctggaggtcccaccctgacttccatctatggtagattatgcttgggacatgtaagccaaataaacccttcctccccaggttacttttggtcgtggcctttaccacagcaacagaaaccaaactaagaaaaatgaggagggagcaaaaccttcaagagaatgaaaaaaaggttgttctgagagggggtgtgaatgccaagttgttctgagagggggtgtgaatgctttaaagcttggtgagttagaaagccattacagggtgtgaagagggacacattcagtgggaaccaggtcttgggttataaggaagctccttctatgccttccactgtgtacgagggcaggtctcacctctctgaatctataatcagcagcagggtaggattcggctccattactgagaagttagccagattggtgggcaccaaggtggcacaaggactgtgctgttagtagacattccttaaacaacactaaaaccaaaactcacccactcagattcttcctaaaaccatgcttcataatgaaatagtgtgaacacaggcaatagaaagcaatgtcaatgctaaattgctctttcctgccagagtgttttatctcattcctcacccccttggtatgcttcaaggccagagagccctaaattggcagacagtcccccagaagagccttccagtgccactcaacaattaccatcgattagagttacactcacagtcaaacacagcactacagaaaaattaacagaggtggtgtcaccagctgcagaatggccccagaggtagagctcctaatacctggaccatgtaaatgttaccttatttggcaacaacttcgcagatgtgattaagttaaagatcttgagatgcagaaattatcctggataatctcggtgggccctaaacacaatcacaagtatccttacaagagagaggcaaagccatgtggctggcttgggccaccactggaagctaaaaaggatgatagattctcatccaccgcctctggagagtggatggccctgctgctggcaccttggcttcaaaccaatgttactaatttcagagttctggcttccgagtacagaaaaggggaaattcctgttgtttacagcagtcacaggacagcaaatgggtaagcagagaaaagcaacctccagtgaagggagaaccctagttcaaaggggatttctttggatttttgagatgggtttctctgcgtaacagctctggctgtcctggaactcactctgtagaccaggctagcctcaaactcacagagatccacctgcctctgcctcctgagtgctggaattaaagacgtgcaccacccacccccgggctcaaagaggatttctgtagtgtggaaataatttctgctgttcaccacacctgcatcttctccctggagtctgaggtgtttaaagcttcagaggtgttgtgatttcaatattagatgtctcctatgggctcatgtatttgaacacttggtccctaactggtagggaagattcaagagcattgctggaggacgtgggtgactagggttgagccttaaggtttcctacttgtgctggctaattttgtatcaatttgacacaagctagagtcgctggagtggagagagcctcaattgagaaattgcctccataggatcaggctataggcaagcctgtagggtatcttaattagtaattgatgggggagggccagcttattgtgggtgatcatagttcttgccatttgctcttgttgcttcattggcgataggtcttaaatgtgtatgttcttacatttcctagagaacacttgttatttgctatctttgtatatagctctgtatcaagtctaaatctattctttagactaaaggagtacttgtagtgagatatccactctgccctcacctgttgcactgaccacacccgtttaggcctggtgacaagtgtgaatgtgacaggggaaggctaggcctggggtcccggaccccagctcgctctcttgggtcacatttgggtcacagagagcagcctgggtgtggttcctcggagcaggaacttacaggtcatctgtttcttttgtaagtgacttctccccgaataaaattaatctatatttaagcaagttctgtgtatcttaatctgtgcctctacaggtgatgccatccctgggctggtggacctgagctctataagaaagcaggctaagcaagccagagggagcaagccagtaagcagcacccctccatggcctctgcatcagctcctgcctccaggttcctgccctgcttgtgtttctaccttgatttctcttaatcatgaataaggatgtgaagtatagaccaaataaaaccctttcctccccaagttgctttggtcatggtgttccatcacagccatagaaaccctaaccaagacaacagcccagccccacttcctgttcaatcttcgcttcctggatgcctatgcagtggaaccaggtggcctcccagtcctgcctccaagactttatgccatgatgggatgtttcccctcaagctgtaagccaaaataatccacttctcccttaagtattgtcttgtcaggtatttggcacaacaatgagaagcacagctaaggccagcagagactatagatgagcccttagatggagaaatgtcacaaacactctccaaagtggcactgtcccccactgccactcaggcgacagtccccacggcactgggtgtgaacttgctgccagaccagagttcctgacatttggccacctatcttggaccaggatgtccctgctcataatgacttcctgcacaattcctagaaagtgcccagttggctctgtcatctgttctctgggtctggtctgtcactttggtcagcagcctctgcgtcctgctccagtgacagagcattgctccattgtatgaagcatttccttagtgacctactttcttgctccacacatggcagaaactgaaattcccactcacatggaaaacagaatagagccctgagacaaaatgcacaggttatgcttaatacacaaatggacataaacaaagcaacagacttacctgggtttgacatctctctgggaagaaacttactgtgcagtaaaataccatgaaaaacaaggatttacactgactcatgaacttactgaaccatgaggtggtctatagattaccccagttgtatctcatacgtttccctgcgatgctagaaaaaaaaacctgctggtaatgaacacatgtgactcaaacattaagacaattgcttactagaaaaatctcccagcgaattcctttataatgtgaggactccatttttaatttatttttgatgaaaatctgaattcttcccatcatatttgcttaaggagagcagcatatttacaagtgcaaattcacatgtgctctgctccactgccaaggttaaaagccatcctctcaaggaaaacaaggagcccaagcttccactgtggcatctgcaattgtcaacttgcctggtcctagcactgagtggctggaacaatttccatatcttatacacaggacaaaaatcattaggacccctcagatggaaaagcaaggacccccccaatagaaaatgtgcctaactctgggtgtgttaatgagcaaataataaaaggtgatatggccattgacacagtatatgacttatcatcctcaccctagaattcagctagttgtaaaaatgagggggggtgtcaacagagaaaattagggaagagaagtgagaagaagagaagtctaaaactaatgaatatggactagaagaaggaagagtcaacaacaagggtctcaggtttgtctctgcagcagattgtttattcagtgcacaccaggccctgggttcgaacccagaactagaggtaaacactcacagtggaagctctgagaagacaccaataattttcaggaaatctcctttgttcctagtctcagtagtttaaaaatgcctctcagctactaatactttacatctggccaagtgtggcagaacttgcctgtaatggcagcacttggaaagttaaggcagaaggtcaggagttcaaggtcatctttgtcgacttagtgggttcaaggccaacctgagccatgtgagaccctgtctcaaaaacaaacatgccttacatctgtacagttcccaagcagccctccttcctggccctcatgccatcatgatgggctaacacaggtatcatacaatgcaccctaaagctctcacatgctccatttgctgcaaataccttgaaatcacttccagtccatttgcacccaactatgtttatcacctgtctgcgtcagttcaagctgctataacaaaatgcttcagcaataaggcagttctcaggactggcaaacccaaggtcaagatgccagcatattgatctcttggtttattttcctcttgctgtgataaaatatcctaacaaaagcagcttaaggaaggaaggaaggaaggaaggaacacatgtagctgcccaacccccttctctatttatgcattccaagattccagaaagaaaaatcctaagaaggtattccagcctcagttaacaacatgaagataatccttgacaagtgtacccagaggcctgtcttctagatgattctagatctgtccagttgacacttggcatcccatcaattggtatctgctatcttaattaatttggggaagtgatggaggcatgaggatggagccctggggaacaggattatgcctttgaagaagacactggagggaacagtgagatggctctgctggcagaagcacctctggtgacctgggttcagtccctgacctcctgaaagctgtcctctaacctccacatgctcactattgtaggaacacacacacacacacacacacacacacacacacacacacaaattcaaagaataagacacttctacagtttgtaacacttttgcttgctggttacatacccagctatcctccttctgagagacccctgaaatacaggacttgcagttcatggctacatggtcttatttatttattcattcatttattcattcattcattcattcattcatttttacattggctcagtaccttaggttgacctcagatttactacgtagcccaggctggcctcaaactcatcatcccccagcctcagcctcccacattctgagattacaaacccatgccaccacacccatactgagcttataaacattctccccacatggctacctatgagctatggtggtgactctactgaaggcgctgtcactgaagagtgagcaataacatttccacttaacagttgcaacagacacaaacagcctcgtggtaaagattgtcctaacacataggcaaagaaatagcaagtggagtatccaggagtgactgtcttgtcactcagctctctatcacagtaacagatatctgccataaacagcttatgaagacaagaggtttattcaggctcatagttttgtttgtttttgagacccagtttttctatgtagccttggctggactgggactcactatgtacagcaggcacgaattgaactcacagaaatcctcctgtcttggcctcccctgtgctgggattaaaggtgtgtgccaccaagccggctggacttgtagttttgaaggtttcagtttattgttgcttggtcttactgcttctgggtctgtggcaatgcagggtatggcaggggttcatgatggagcaagcattcaacaggaagcagagagaagaaaggccctcactacctctaaaatgccacaccttcaacaacccagaggcctgccttagcctctccttaatgtttcctctacaccacaacagctccaaaccagcaactgagcttttaacacacggacattccagatccaaactctggcactacctttgtttctagtactgtgtatctcattgaacgttaatatcattcagtccttaataacaatgatggtttttaacagcctggccctgtgattcccaaaaatttaacaaaggattctcccacctgcagccatggccctcatctgctcccaggccttctgctttgctggtgtcactcattggggacatttttatgtgaactggggaacagattctacgatcaaatttcaggaaactctgcaggtaaaggagacactccttttctccccttgaattctctgtgttttcaggaaagaactctaccacagacagacagtggcttcaagaagagaaccatttggtggctgcagtcttgtcctcaacacaagcaggagcacacactctcaagtccacctgactcccaagcaagacaagaaaacaaaagtctgacttgggctgtagcaccattggcagcttgcttggctggtccacacaaagcccaggattcaatccccagctcttcgtaaacttggcatggtagtgcacacctttcaacccagcattcaaaaggtagaggcagagggatgaaaaccttaaagactcctaggctgcagagcaagtctaaggccagacagggttacaggaaacctgtcccaaaagaggaaaatccaaaaaggaaaagaaaattccagtcagcatttctttcagctacgccatgtcactgctatacctaagatgtttttctcctctgaattaacaggtattaccgcaatgaaaagacaaggccatgttcctgagagcagtcattcacatgcctcctaccacatagctaactctttcagaaaaaggttcgtgtggccttgaaatctgggagaaaaaaaaagcaggccactcactcctgctcgcccccaatgtccttgagtagaggtttagtttcttggctcttctttccaaacacatggtatgttttttaaaggacagaagagcaggcaaatccgctcatcaaaaaggcattgacttttaattttacaaatgtgcctctctccccataaggaatagagagaattcattagaaaccataccctggagactgatcccgcctgcatgtttctttctcctggctatcatataattataccccagatctctgattacagaaactttcccctgaactgctacactttcagaatctttctttcccatctctccttttccagaaactctttaagaagagaagaaatgagaaactgataagtgtgtgtgtggcaagtctcaccttcactcctgcagaggaatgtaactgtggatgggtggaaatccatcagtgtccctagaaaagaagacagggtctctagccccaatctggggtaaactgcactaagtgctgggatgatggacatatgccatcaatttatggggttctggggattgaacgcagggctttatgtatgctaagcaagcactccaccagctgagctataccctgccaaccatccacaggaggcaattctaatatgagtccttcttgcagtgaggcaggaaccaggtgaactgctctgatggatgaatgaaagagatgctgaaagaatttcatgttcagcatgcaacactccagagacacttgactgccacagatgccagccttgtagataactagacccttctcagcctgccctaggcattgtttggccactgacactgacgaggaaggaaattatacagatcagcagcagttactactagcctcaccaaaatgtttcttctgtgcttgctggagcaaggcctgtgtagaacaaaatcacccatggtagccagcaaaatggatcaacaagaaagatgattgccaccaagcctggccacctcagttcaatccctagggcccacccagtagagaaagagaaaaccaattcccaaaggttgttctctgacccccactcatagagtgtgtcatgcccagatacatattctctctctctctatctatctatctatctatctatctatctatctatctatctatctctatccccccccccccccccctctctctctctctctctctctctctctctctctctgtatttttaaaattttagaaagaaggctgggcattggtggcacacacctttaatcccagcacttgggaggcagagacagatgggtcttgtgagtttgaggccaacctggtctccagagcaggtgccaggataggctccaaagctatatagagaaaccctgtctgggaaaaataaaaaaaaaaaaaattagaaagaaagtgcccatggtatctatgctctgtcaagaggttgtaggtgataatcccaggggtacaagacactgaaaaccctgctaactcatgcaggtggcatctgagggatgctccattctgctcccttcaaatgcctccctctgccccgtcaaagaacagcaggacaacagaggggttgaaatgtctgccttcccgcacacaatcatatcctctcttcttttcaaagggaaatttgtctccttagctttctggtattcatctccagtgatgaacaataggttaaaatttctgagaatataaactacaggaattattattcactccttgccctagatctctctgtgagctgccggctgcatgttctgcattcggtgacgaagggcccgtcccaagtgttttcccagttcaatcaactgtgctaagaactgtcacaatagcccttgacgacaagaaaataaaatttagggtagaatgggagcctgacttgcattgtgattccagtatgcacctgttcccccttcctcaccacactgttggcaaaccttttcatccaccttaatgacaaaggaaagggaatgggttgttttccaggcttgataattacttctgaaatgttgtcacaatcttccaaatgactgtgtttctttcatgttagaccactgtgatttcagagctgcacaggttggggctttgttaggattctggtccgcagagggccttcggagctttgttttcttctgttgttttagttggggggggggcgggcagggagggcattgttttgtttctttttgttttgtttttggaaaagacaaagcaaaaccaaataagtcacaatgataacttatgacagaaaaatcaacatctgaatcaaatggtaatagcaggagcctcgttggggagaggaggcagtttgtgccaggaaaagaaaggcccagaaagttatttaaaactgatcaaaacccactaggagtcacaatcccatcatgtcttccctttggaaaaacagttttcagaagccccaattaaccttaattgaattctgccttagtaatatctggaattttaattgactgggaaggtgatcataaatctctgttcataatgtgcttagccattaggaaatccccggatggcacacagccttgccatgcagggggctgagccattctgtaggtgaggctgggtttcaggtcctaatgcaaacattcggaaaagaaagctgcgcacagggagagcagcctaagattagctccagtggggaagttcagtgtgaaagtaaaggactccaatagcccaaggtttctattagtggcatcagcttcaatgtggtcccaaaacacaaagtcatacccacacacacacagagggggggggggggggggggagggagggagggagggagagagagacagagagagagagagagagacagagagagagagagttagagttgctcataaagaactcaacccaagctgggggtgtggctcagttgggagagtgctctcctagcatgctcaaggcccagggttcaatccccaacaccatataaatctgaaattgtgatgcaggcctgtaattccatcactggggaggtggaggcagggaggtctatcaatattattcttgactacacagtgagtttgaggccagcctggctacaggagacaaaaagacacccagaggaagagacactcattgctccatcactcaggataaacacagtggtagtctctgggatttctttggtagggggaaatggggaagaatgttttttcaactggatctcccatacccaaactagcttggaacttgctaagtagctgaggtttgcttccaactcctgattcccctgcctcacagctccctgagagttgagatcaaaagcatctatgcctgaattaccatgttcatcttattttctcttttaaaaacataatcatcctcacccctccctattttttaactcgaggaactatcttaggcctttaaaatgacctaagtgtgactattttggcctaatctggtgagggtgtgggagccaccagaatgacccaggcgctttcttagaagctcaagagtgtatgtaaaaccaaatgaaatgtcaaggatgtacattttgaagaaaaacagaaggagaacaacttttctggtaaattctgattctggtcctccttttgtactccaaacccatcaacttgggcagagaaaccaatggtttgagtaacaccaagcagtcaatcagaatgattggctcttgtttcatgaaactgaacgtgtctgtggtgagatggcagacacagacctacattgtcatcctcgctggcctgaggaattcccttaatctcttatttttctaatcgatttatttattttatgcttatgggtgttttacatgcacgtatgtctgtgtatcacaagcatgaagtgccttcagaggtcctaacagggcttcagatgttctgcccctagactttaaaatggttgtgggccgccacagggcactgggaatggaacctgggtcctttggaagagcagccagtgcccttaaccactgagccatctctccagcttccccttaatcttttagggaatacaactcaggtcaagctgggatttgtggcttcagttctaggaagtttcagcaatgagcaatctgaagcagagctggagagctcattaatgatatcaaaaaagaatggcattcaaaaagacgggaagagcatgaagagaacacggatgtgggttttgctaagagaaactcagaaactacggcatgcccaagtgtaggcatgggctcctccagagagttgtgacagctttagccatacacagtttttggtgaacctgaagttacatcacatcaagttgctataaaacccttttctctctctctctctctctctctctctctctctctctctctctctctctctctctctccctctccctctccctctccctctccctctccctctctctctcctctatttctatctctatctctctctcaagttactatgaaatacctctctccctccttccctccttccttctgactgagttaaaatctgataaggtgagactagaagccagtagagtcacacaaggccttagtccctgtcctttccttgtaagcagaatttctagctaagaggcctggaaacttgcagacccacaagacagggaagcgaaaggccataagcagcagaaattgtacagggttcctactctctgttggcaggaggcttcagggggattcctggggaggtgtcactctccttcctcaatctgagatttttcctgtcttctgctcagctccaagtgaatgtttgggttggctaacctcatcagctgttttaaaatcaactggaaatagttagcctcctttgaagaagatattctcctcttcctcaggctgtctcctatggagaatggttgtttctctgacgctgtgataaaatactatgaccaaaagtaacttgggaagagtttgcttgacttatagttccagaaggtacagtccttaactgcagaggacgtcagggcaggcaccacaggaaatcagctgataatgttttaattcacacacaggaaaggagggaacaggaaacagagaaaggctatgaacccacaaaacccagccacttgaggcggcatctcataagaaaacagagccaactggagaccaggtgttcaaattcacgagcctatagggtgtctctcgtgcaaaccaccaaaaatggactcctagctgttcttttttttttcatttcaacacctacttatgctaccagcggacactgtgacaactcaaaaaatctccagcatgtggagtagacattctatacacccagccaggtaaggagatgagcaacaaaaagcaataaaattacattttattcatctacgtgtatgagtgtgtgctatagtgaatgtttggagaccagagagaaacctgtgcaagggttagttccctctaccacatgaatcccagggatggaacttgggtttctaggcttggtggcaagggcttttatccactgaggcattaccagcccaaaagtgaattttgaaagaatcccaattggaacacgaggaaaaccagccactcttgtaaagatgcacaactctcacccttctcacctatccctgcttcttcgaaggactactgagatgcttgtgatcacagataaggtatggaaactggtacagtgaaagctctgggtcatttcttcccagttctaattcactttcaaagtcatgatcaacccagaggtagacaccagactgaaacagaaactctgcagacatcttctaaaacctggatggaaaggaaatagcaatgaacattacccttgactattttataaaattaaatcctgtcctgttttttttgtaactacctcagcctctctctctctctctctctctctctctctctctctctctctctctgtgtgtgtgtgtgtgtgtgtgtgtgtgtgtacatgagagagacagagaaagagagaggggggaatgtttctctgtgtaaccaccctggctgccctagaacgctttctgtagaccaggctggcttcaaactcactgagatcctcctgcctctgcctcccaagtgctgggattaaaggtatatgcccagctttgtctgtcttttatacacattttaaaacctcctcatctaaactatacttttccaaaaaaagatattgagaaaaacactattaagaaaatctagacagcaattaattttgccccctgcctgctgtgtaacttttcaagcctccttggtagacaggaataagaatgtcagtgattgatgagagcaaagaagatgcctacagaacaggcctgcatgctaattatcctaattccctcaatatccctcatttagaacagaatagcaagaccaacagaggggattacattagtaagtctaccatctacactggataagcgccagaggtcgacatcagtgggttgtagctgttcacagattggctagtttccaggaatgcttccagttacctgtactgaaggtcaaatcacagagcaaggccagagagcagtcctaaccacaccacttaagaataaatattttcagttttatttccaaagtgtggtcagtgaagtactttcttcagatccatcccgggtccttactatcacttggcttttgagccccataccggatttattgagtcaccttactgaaagtggcactaagactgtgcatttaacaagcttttcagattaaacttgtcctcaacaaagttgaaaaaccactgaggtaggcaacaattattaccatttatgggaagttttctatccaggcaagtcaaagcattattctagttgttcaaagattgaattcagaagaacttcccccacccacacacacatacttattcccaagatgccaaattaagtcaaatttcttattttattctgttgtaaaaatcataagaggcaaacagatgtctgtccaaggctagcctgatctacagagagttccaggacaggcagagaaaccctgtgttgaaaataaataagtaaaataaaaaaagtatgtgtgccctccaggactgcaaagtcagcagcttacagtggatggcataagccagttctctggccgggtgttggtggcacatgcttttaatcccagcacttgggaggcagaggcaggcagatctctgtgagttcaaggccagcctggtctccagagcgagtgccaggataggctccaaagctacacagagaaaccctgtctcaaaaaaataaataaataaataaataaaaataaaaaataaaaaagtcagttctccatgggtgacaaaacagaccaccccaataaatcggataaaatttgcttgtgattctgaaggttgactgagtgggggattacttgtttgttttgacccagcttatatgggttaaataatctaggatagcatctctcatgtggctaaactccctcaatacccaacctgggcttcccatacataacaaacctaagagctgatagaatacacatgaatacacagagagagaaaaaaaaagagacagagagacagagaggcaggctgtggtccagctaatccagcaatggctagctatgaatgaaaagaatccaagaatccagtagttgttcggtcaatgaggttggatgtttcagctggtcttcagtatatccagaatcttaaagaagtaagctctaatgccagtgaaggaatagacttgccagctaaagcgaaggcaagcaggcaaagagacagctttcttcttccatgtcctttctttaggctgccagcagaagatctgatccagatcaaaagacgatcttctcatctcaaatgatttcttaagaaaaatccctcaagatgccttctgcctgttgccccatcacctgtggtgggtgagggagctgacccttaccagctgcaacacttgggaaagtagacactgcatctcgcctgggcagcacagtagagttgaccctgctgacaagggtgggggtgaaccaccctaagaacatgagcatggaagatctgcccacacccatctgccatataatggtgtaggtggcggaacgtgggggcacaccaacctctcgacacctgtagcaggtaggagagcttgccctaagatcataagagtgggagagctagctgtccctgcccctcaccagctgcagtacttgggagagtggcccctgcacctggcctggacaacacattaaagctagcccttatgatgtaagtatggagagccaaccctgaagacatgaaagcaggagaactagcctcaagtcttgctcattgctgttaggcgtgaactagctggggcaatgcaggagaccttaccctggtggtgaggacaagggagagttaccaggctaaccaaccctgcaaccacccagacacagaaccagggctatgagttgacccaccccaacatccaccccatctatgatctgctggagcacgtaaagggacctgacccacagaccccaaactacagaatctccatgacacacggcaacaacaggatatccaagaggagtcccagtgagggcccagcattgatagtgtagcagaaaccagaggtcttgaaccagaccaatcactctttgcaatgaacacttgcaagtaaagctatatggattaaaaagggttcactacatgactcactgtgtcacactggctgccatgagattatttttttattcttttttctcttaaattttattttattgggggagattgcaaggacagagggcagatacaaaggacagagaaatgaatgggaccaagatgaatgatgtgaaagacacaaagaataaataaaaagaatgttttaaaaaagtgaaaatccctcacagatttccccagccacttgagttttagttcattccaaatgtagtcaagctgataccaagaatagccatcacacccaccacatttatttacccacaaaaaaaaaaaaatcatcagtgaggagggcatagtagtacatagacgtcatatggaggctgaaacagaagatcactagttccaggccaacctagactctaaaatgagatctgatcataaaaataaaagatacctaggcagtgatagcacacaactttaatcccagcacttgggaggcagaggcaggtagatctctatgagttcaaggccagcttggtctacagagtaagttccaggatggcagggctgttacacaaagaaagcctgtcttgaaataaataaataaataaataaataaataaataaataagtaagtaagtctccaccaacatctaaaaaataaaaataaaaaaaaaatccattaacctgataggctggggttgtggctcagttgatagcatacttgcctagcctgcatgagaacactggattggatccctagtactacataaaccagaagtggtaacgaacacctacaatctagcactcagaaagtagaagcaggagagtcagaagttcaaggtcaactggttaagatggctcagtctgtacaggcacctgcaatcaagcccgatgacttgtgttcaatccccataacccacagagagaaaggagaaccaagccccaatcccaaaagttgtcctctgacctgcacatacatgccaagtgcacatacatacatgaataaatatgacagaaagagatagatagacagacagacagacagacagacagatgatagaatttcactcccaaaatgttccatgtcatcttcagctacataacaacttccaggccagtttaggctacacaaggcccgtctaaaaaaataaataaggccagagatatggctcaacaagtagagttatttgccacccaataatgcaagtctagtgacctaagttcaatccctagaccccgtgtcaaagtggaaggagagaactgactccacaaagttttcgtctgacctctgtccaaattcatgctgttactctctctctctctctctctctctctctctctctctctctcacacacacacacacacacacacacacacacacacacacacacacacacacgtgcatgctcacacacactttaaaaatcactccatctggaaggggaaagggtcaagatctcctgagaaaattgggagcacgggaagaggggggagggagctaggagaatgagaaggggagaagaggagggatgcagaggacatgaggagcagaaaggttgagtcaggggaagaatagaagataacaagaatggagatgccataatagagggatacattttaggtttacagagaaatcaggcactagggaaatgtctggagatctacaaagatgacaccagttaacaatctaagcaacagaggctaccttaaatgccctcccctgataatgagattgatgactgacttatatgctacctgatagccctcatccagcagctggtggaagtagaagcagaaacccacaactaatcactgaactcaactggaatccagatgcagagaatgacgagtgaagagcaaaggggtccagaccaggctggtgaaacccacagaaacaactgacctgtacatcagggaactcttgttccccagactgatagttgggataccagcatgggactgatccagaccccaagaacatgggtttcttgaggaaacctcggaaatctacgagacctcctgtggtagtccagttcgtatccctagcaaaggtgtggactctgggagcccattccacatagaggaatattccctgagccaagacacatgggggtgggcctaggccctatcccaaaggatatgatagactttgatgacaccctatggaaggcctcaccatccagagggagcagaaaggatatgtgatagatagggttttagttggtggggggggggttggtaggggaggactggagggagaagggaattgggattgtcatgtaaaacaatcctgtttctaattcaatcctgaaaaaaatcactccatgtggcattgaaaaattttcatatctgatgtatgtttccatcctttctcactaaaaaggatatgcccctcccttttgaagaccattttctatctatctaaggcacactaatccttcgagatacgcacccagacactgtgggccacctacaccctgtcgctgggcatattatactagttttcagttcattgtgtgctatgttatttatgatgagcagaaaacttatttctcagagttccaaggacactgccatgattgatgtctggtcaaggtccagtttccactcccaagatggttcctggaggctgcatcctccagatgtgcagagcaccatccctcctaagtcacacagaagcctttttagtttgacaggaatccactcaccctcatgacatccccctttaggttccacctcccagcatcgttgacaactttccaacccatgagtcttggaggcaggtgggcaattcaaaccacaacaactagtaaccccaaatacacaacagctcacagtcctgttctaaaaagttctgttactcgccgggcattggtggcacatgcctgtaatcccaacactcgggaggcagaggcaggcggatctctgtgagttcaaggccaaccttgaaaccctgtctcgaaaaaccaaaaaaaaaagttctgttactcaaaatcacctctgatgctacatattttctcatttccccagttcacaatcccaggtactgatcctggactctattttgtagttctgattaaactgacacactggttgcaatgccttaacatcacgtgactccctcagctgcgttcagtccatcacccagtatgtgacagacctcaacacattttcagagtcaagagataaacagggaagtggggctggaggtggagctcagttgctagagcacttgcctaacatgaacagacctggggttgatcccagcactgtataaatcagtcttgatggtatctacctgtaacccacacattcaagagttggaaccagaaagattagaagtttaacatcacctttggctataaaaaaggtgtttgagcctagtctgggctaatgtgagaccctgtctcaaaaaaataaaacaaagagaggcaggactaagccctgccatgtcagcacattgagcccacatcaggctacaaggactgtactttggctcataatagcactggcctaataaaatgatgcaccctactatgaccgtgttctgcagtattagcaatgcaaatatgcataattcactacctcaatttcttcctatataatttgaaagttttcgggagcaagaaagtcacaaatttcccccattcttggttttatcccccaattttcacaggacctgtgggtgtgctgttatctctgatggacagtatttttgcatttacccaatggtatttaaatttatctgatcacattttaaattgggctaatttatttgatttacttaatctaacttaattaaatatcatctccacctgatgttatttaactacttttaatgctgctttaaaacctatcactgtccagaagctaatcagaatcaataaaattggtttggggaaatgcttcccaaagtgttatccctgggtcaacaaaagactaacttagagacttagtaacagtgaaaattcccagaaacccaatccaaacctactaagcaaattcgaggtccatctggctctcttttttttaaaacaatgagtatgagggggtgcaatcatgtcacagtgcaagtgtaacggacagaggacaactctcaggagtcagttttctccttctaccatgtggatcccagggattgaactaaggccatcagacttggccacaagcacctttgcccgctaagccatcttgctagcccttggctgtaatttctaaaaccctctggatgagtccagtgtagactaacatgcaagaatcacagagaaaaattgggaggaatagtttctagacaaatcagaagctaactcacaagatgtgagctttgttgatgaaaataaactcttctcaagctatggtttgcatagatttccaggagcctagtagagaatgcagatgagtacagtggctgaaatccaaatcccttgactggccccggggcaggatatacatgtgtttattctagatctaaggggatagagatgcgtcatagtgtgacgctgtcagcaaccagttacttttagagttgggacttttcttcccaagtgaaagaagagtccaaaaggtctagaatacactccaaagagtgcatgtggagatcagaggacagttatgtagaatgtgttctctccatccatctttacataaattctggaaatccaaactcaggatgtcaggtttgcacagcaaccacttacatgtaccgagatatcccacagatcctatcttaaattagaagatctataattgaaaacctttcagtcatttcatagagaataaaattggcagtgagattgaactgttctggatatgtaaagaggaggtctagagaaaaagagtaaacaatctagacttcctgatgagctgttggtcaaccaaaacaacatcatctccattcctctaagtaccgtatccaatgtgtgtggtgtcttcagtaataaaggcttaacttcaagttctgggaggtaaccaagggcaatggcaacaacctccttgatggtacgagtcactaaagagtggcattcattgacaatcatcttgatatattcaagccacagtgtccaggcaattttaagaggtattgattttacaatgaacctccttcccagtcccacctcattcaaaatctaagacccaagaacttgtaaacacatttctagaagagcaagcatctcttcttactgaagctccaggagacccagggttcagctcagtaggttccacccaacctactcaaggtccccaggtcagtccccagcactaaaaaataagtacacaaagcaaagccaaagagagccactgggaagttaggaaccacgtgacacactggggtgattgagcaggaagatcaggggttaaggctacataactctcaaaaaagaaaaagtatgtgtgtgatgtataggtttgagtggtgtgtgtgtgtgtgtgtgtgtgtgtgtgtgtgtgtgtgttgatgtatatgtctatctgtatgtgtattgtgagtgtatgtttgtgtattcaagtgtatgtgttcacgtgtctgtgtgtctattgtgtctcaatgactgtgtctgtatctgtgtctgtgtatatgtgtgtatgcctgtatatgtgtatgtctctccctcctttcctcccgccagcccgtgtttgtggggggaggggaactcttccccaaattctctgcccttccttctcatcattcagattcaaagtaatttcactgagctgccaaactgctacattatcaactaaaatccaaggagtcttcagccaggcagaataggcaagccttcatcagtatagcctgcagtgctttttatgtgctcactcctaaatgcctggtccatcctggtgaattcatcctcagccaagtggccacttccatgaagggaaagctgcattcatgcatggtgccttcaggcaaattctccccctttctgcctttaaacaaggacatccagagttccgaagaacaaatgaaccacaagagaaagctttaggccacttggccttcagctaaggctctcaaactgagggagacctctgtgtgattgtgtggggcctatgaggaggccagaggacaatgtcacaagtcattcctcaagtgttccttgcctgggtttttgtttgtttgtttgtttttgtttgttttgaaacaaggtttcgctatgtatccctgaactgaaacctgctatataggtcaggctggtctccaattcatagagttccacctgcctctgcctcctgagtattgggattaaaggggtgccaccatgactggcctctccctagggattggagaaaccggaaggactttatatcaagctctggaaatctccatgccagattgtgttactaaatcttgacatctcatcatctccttaaagagtctcctacattctatgtaggacagggttagagcagagggtggtactgtttcttggcccctctgtgtctttgtcagccttgtggcatggccatcttattcttgtcactataaaaattgggatgacagcttcactgtggtggaaagagtcaaatcagcacacatgatgccagaaagagtaagggaaaatataaagatgccccattatataacctttttaaaaatcctttgctgttttctgggttgagtgacatccagggtatttttcagatttttttaaagacgttctttggtgaaacataaaaaaacaaaagagcttagggagtcagacaaacttggtttaacttcttgcctgcccattttctgtatgattctagaagattttcttggtctcttactccatctcattgactgtaaaacagaatgcatgagagtagaccacaccatcttgatatcatgatgattgactgtgccccagttcctttttattacatttttttatttcaattagaaacaatcttatttatatattgatcccagctccctctccctccatcctcccatgcccccccacactggcccccatcccatccctcttctgctccatagaaagggtgaggccttgcatgagcctcagttcttataaagaggttggaatctggcctggaacactgtaagtgctcagttaatgttaacagttaagtaggaaggtagtctctctccactgacatgtgagactttgtctccatcctacaaagtgagaagaatggcacttgcctctgtcaccttacgactacaacaaaatacctgacaaaagccactgaaggaaggacttctttgggctcagaatttaaaggtattggtccatctaggcaaagaagacatggtggtaggagtgagggaactggccaagtcaggaagttaacagagcaagaaagctggtgctcatgtgatcttcgggcctccacatgggtaccatgataagagtgcacttgcatgtacacacacaaaataaacaaataaatgcaatttttttaaagctaaagatgcatccagacgtttgtcccccaggtgcttctaaatccaaccaagctgacaatgaagattaaccataacacagccatacagaattgcagtgttagagaaagtcactgggacccagttggttaataagttacaactattgatcttcaaataacaagcccattgatctgatcagcccctcctcagcttcctcaatgaagggttctgatctacttaggagagttttgtggcttgaggcccctggtcctagtcacacatcactcctcaaagacctctctcttttagatagcatctattcctacctattatgtgcttcataaaaaaaaaaaaaaaaaaaaaaaaaaaaaaaaaaaaaaaagctaacgttgccttagggtgacaggatttctgccttttgacactttctgtttttcatggctttttccccctttttctctcctttttaagtttgctatggttagcttattgcactctatataggaccaaaaaaaatgagttgttaattggaaagcctaggttctcccaacacccagaattaaaacaatacacttgggtccagagaagaaatgggtattgattccacattaactatcagaaatgttcccttcccccacagccagaaagcaacggagggaccctcctggcttacctaaacaactctcatgctaccttcaaaagcactgtgctaaagccctgaagtgagctggtcccaaagtcacacttgaagtttatccccctaactttcaacctctccaatcagtttaatcattcattgattttcagtcattcacaaattactatggcccatgtgttgctctgatagacaatcttcagatacaaggccaacaaagccaaaatctccctccccctagtttcctgaatgcagacatttgttcactaaaaagacatgagatctcaggggctggagaggtggctcagaggttaagagcactggctgttcttccagaggtcctgagttcaattcccagcaaccacatggtggctcacaaccatctgtaatgagatctggtgccttcttctgggctgcagcatacatgcaggcagaatactgtatgcataataaataaaaatgaatcgttaaaaaatttaaaaaaaaaaaaaagacatgagatctcaagtcagcactgatgctcactgagcaaacctggagatctgagttctattcccagaatctacataaaggcagaaggagagaaccaactacacaaagttgtcctgtggcctccacatgtgctgtgtggaatacatacatacatacatacacacacacacacacacacacacacacacacacatttcttttttggtggggaggggtgttctgagtcatggtttctctatggttttggagcctgacctggaactagctcttgtagaccaggatggtctcaaactcacagagatctgcctgtgtatgcctcctgagtgctgggattaaaggtgtgtgccaccaacgcccgactctctcacacacacacacacatttttaaaaacaagataaactgtaagttttttaaagacataagacttaaaaccagaagaaagaagaaaggagaggagccgggagctaaaggaaggaaggacagcatcagttctgtgtcctgctcagcatccaggcctctagctgaaaaggaagaatcctgccacctctggtccctctgtaggactccagcccagcaaacgtgtgcttttgtttcttttatttctctctcgctctttaatgaaacatgccctaatcgggcatctctcacagagagaaagggactaacattaactaacaccatcccaggtgttttttttttttttaaagtctctttgcagtagactatttatagatccaatgaggtcgctctgtggcctcctacccagctaagtttgtaatattctggggtcaggcccacaaccatgctgtgtggttgggccttgatgtcccacaggggctcttgggattcttagcatgcaatcgcttgtcttgatgggcactctgccacccaagccacccctctggttcccactgttgtgctcacactcagtcatactacaggcaaaacctggcacaaaacagtgtcacagttgagcatccttttgtaaaacaaatatgagcattgtccatacatacacatgtatgtgtatgtgcatgtgtgtacattttttgtgtgttatttgtatctttctttcccagtctacttcaagtgtaatctctaagactctatcaaaagaggcttggaagtgcctgtctaggctcccccagaattctaggacatcaaggcttttaacacacctcacagaacaagctgagtgtgtgtgtgtgtgtgtgtgtgtgagagagagagagagagagagagagagagagagagagagagagagagagagagagctattgtgtatggaggcaagtatgggcaaatgtggacatcaggtgtctttctcaattactctccccattttttttttaagacaggatctctcactgaacccagaactgatttggctagaccagaaacaagtccaagggattttcccattactgtctctgcctccccggctctgagattatagtcatgccctgccacacttgactttatagagttctggggatccaaacgcaggtccctcatgcttagtgggaaagcactgcttcttgctggactgtgtccccagcccctgggctctctcttcagtctgcttcactcaacacaaaactatcgaggttgtttaccaaatttcccagttgggtgaataaaaagaacaacatcagagacatgacataagaaacagagccactgattaatgatatatatcttgattgactcagctatgccaaggcctgtccacagcttttcagttaccatatgcaagtattcaactagcttcttagtcagataccaccattgctggctctccttctgggaaaagagacaaccattaatgatgcaagcctcccactgactcacttctcccttccacatattcctgtgaatagcaacctccaaaagaaaagaaacagtggactacttctccctgggaccccttggtagtctactagagggagctccttgtcaccctatcctactcagatttttcagaccacttcaaagataatactcatgagagcatctccatccatgttggccagactggtgtccagatcagcaatgcctactgggaactctagtgcctggaacatggtgtctagcctgatagccagatgccaagtgacaagatcattgggagaggagatgactcactccttcagcacctacttcagtgagacagacactggcaaacatgtgccccagacagtgtttatagacctggaacccacagtaattgatgaagtttgcacaggtacccaccaccagctcttccaccctgagcagttcatcacaggcaaggaagatgctgccaataactatgcccatggccgctacaccactggcaagaagataactgatcttgtcttggacagaatttgcaagctggctgaccagtgcacaggtcttcagggcttcttggttttctacagctttggagggggaactggctctgggttcacccccctgctgatggagcagctttctgttgattatgaaagaagtccaagttggagttctccatctacccagtcccccaggtttccaccactgtggttgaacccatcaattccatcctcaccacacacactagagcactctgattgtgccttcatggtagatgaggccatctatgacatctgtcatagaaccttgacattgagcatccaacctacactaaacttgaccaccttattagccagattgtgtcttccataactgcttcccttatatttgatggagccctaactgttgacctgacagaattccagacctacttagtgccctaccctcaaatccacttccctctaagccacatatgcctctgtcgtctctgctgagaaagcctaccataaacagcttatagtagcagaagtcaccaaagcctgctttgagccagccaaccagatggtgaaatgtgacccttgccatggtaaattcatggcttgctgcctgctgtgctgtggtgatgtagttcccaaagatgtcaatgctgtcattgccaccatcaagtccaagtgtaccatccagtttgtggactggtgccctactggcttcaaggttggcattaattaacagcctcccactgtagtacctgatggagacctagccaaggtccagagaactgcgagaatgctaagcaacaccacagccatcgctgaggcctgggctcacctagatcacaagtttgatctgatgtatgccaagcatgcctttgtgcactggtgtgtggggaggagggggagttctctgaggcccatgaggacacggctaccctagaggaggattattaggaagttggggcagatagtgctaaaggagatgatgagggtgaagaatagtaggccatgtgcaacaattctacacttcattgtcttctatttgtctttgtatatgtgtataactgtcctgaactatcaataaaggtgcttccagtttaaaaaaaaaaaaaacactgggattaaaggcattagccaccaatacccagcttatgtagttaactagtggataactccaccctctgatcacaaagcaaactttatttgtcagaacacaagcaaaatatcacacaacacccagcccaagcaaactttgtcagaacacaaacaatatatcacacaacacccaacccaagggggaggtgcttagtctacctgtgctacaatttttcagagaacaggactagctagctttcagaaggatcaaatagaatttgaaaatcaccctgctttatgtggcaagagctccaagaatatcaaacatttcttttcatttgcaagcaaatgggtcagaagattctcccacgaatatctcttccagaaaagggcagtttcaaaccacagaaaatggacattaccaagaaaaagaacctgctttaagagggcaagaacaactctgagctatctgggaaacagaggtggaatgatttttccctcccacacatgggagttccaaacacaggagaagcacatttcaagcagaacgctccttccagagcacaaatattgggaaaatagacgaagacatgagcgcattctaaacacagctgtgtttgcccacgcctcctgcctgctaggccatgtttgatttaacctggcaactcatggggaggcgaaaggcctccgcttacctaacctgtgacttatcttctccgatcattattgttgatgttgcaaatagtgaattgacctcttattaaatgttgcagccaacaaacaggttttaataatcttttgaaattcacagtaaatgtgttttcagttggctgtaatttgtattcattccaaggacagagatgcccagccacctgctctgagtgtgacagaatgctccactaggggatattgctgcccttcccaacccaccataaaacatgtcagtcgcaaccatctccgggagaatgcgttcattagctctggaaaacagggtgtaggtttgccaagcagtttacaggatagtttttagccttcagaatcacctgagatgagggaccacagaagttgtcagccagtataaagccccaggttgtcatcgaaataatgagcgggtgccctggctggattggttatcttaggcatgcatcaggaggctagggaacagacacgagaacgcttgtggtacagtatcagcccatccctagttagggccctgagggtaaaagcggctgagcatcagcatccaatagatagcaacaaaagccattatctctccctggctgggctgccaagtgcaggggccaggattgcctggtgtttgcggtttccatagcagcgctgttttgttctagctggcaaagtacacagagaggacaggatcaacattgcagcaaatgacacgaacaacctgagtcctgagcctcggatctctcagcaggctttgccctttttgagtaagccatgggggtgaagatggatgctccaagagatgactggaaactaacagcttcttcaatcaagctcagcagctggctgagcactgccatccatccaaggccaccactatgatactctctacctcatttcccaaaactctggaaagtactcggtgtcattaacatgggagaaagccctgcacaggcagaagagccccactgccatctcctatctggaatttttgaagactttctcctctctcagctagccagtgaggttcccctgagtcctggtcactgatgtgatgggtggcaagtgaaccaacttctctaccacttttgctggagaccaaaagggagggcccatgagaacagaggatgctcagatatgatatttgctggacatagaactagtaattttttgtttgttttatttttgtttttcaaaagaggttttctctgtagccctggctgttctggaactcactatatagaccaagttgaccttgaacttagagatctgtcagcctctgcctcctgagtgctgggattaaaggcctgtgtcaccaaacctgcctatataaagctactattgctaagacgagcaaagtcttgatcccagtctatgcattacccacatagttcaaaatcagtctaattggcttccattttacttatggtctattggatagacattaaattagttatcttagaatagagagtagatttatctctagcatcaaggacgcctagaaatttcttaaatgttaaaatttcattttatttcattcgtgtgtgggtgtgcatgtgtgcagttcagcagatagctaaattgatcctcctgtccctgcctctccattacacccagatttttttgtttgttttgtttagttttttggttttggttttttggttttggttttgttgttgttgttgttgttttcttttttggtttttgtttgtttgtttgtttgttttttgacaaggtttctttgtgtatctttagcctgtcctggaactctctctgtggatcaggctggccttgaactcacagagatctacctgcctttgcctccccactaaccaacctcacacccagatttttatgtgcgtgcaggggaaccatacccaggtcctgtactgacctcctgagacatctcaccagcccctactttaaggacgcctagtgatggttacgccttcattctctgtcagggtcatgacttcacactgacaaataagacaaatttagagttccattaaactttgcatttgtgaaagatcatgtcagattaaggatgagatgtcacaagctccaaaccccagccacaaactaaacccatgagtctggtaactgccttttttcctgatcattgcaggaaggacttactgcaaatagactggctgcctgcctcctccctgttctaagacagggctgttgtaatgttactgcagcttgtgggtaaaactagatatagccacagaactcaaagccgttccctatgtgaatatgtgtgtgtgttcaggttaacagccttaagtgctttttattctggtaacacagactgtatgcacgtatgtatgtatatatgtatgtatgcagctaggtctaaatgtcaaaattaaaagggattggaagacagagccgatatggaaggagttgcaaaaccctcttattaaacccagcaaggtaaacacaggacagatgtctgaagaattgattttagctttgatcaaaagtcagacttcattgatctttgtttctccaaatcacgagcagttgccaggcacaccataggtacttataattatgtgttgaattaatgatgtgccctgagctcagcatcagaataaagggtctggaatgtagcttagcacctgaggctcacactgcttggcctctgacccctcctgcagagtccagggagggagtccagcctctaagcaccctgatttcaaggtttgttgtcctgttgctgcagctgaggctagaaaaaaaggcaggtcacaccttgaggggggaagaatcaacaatttctaccctttgttctaaaactaggcgaggacttatttttgctaattatgagttgaaaactggactgcttctgtccctgcaatccctcaggaaacaaacctgtcgccatccacaccacttcatgttcatgtgcagccctgggtctgagtttgcacaaagcacattcaagattgattcagtagacaaaaataaagtctaacaaaaagcttctaacctctaggttttgacaattcaacattagccatcatgtaagagtttaataacttctatgtactacactaagcatgtcattaacatctaatttattattcattcttataaaatgtacgaagttcagagaggcaaagtagcttgccctggatcacacagctagcaagagctagagccaaatttgaaatgaggtttggctgactggattccagccgggctctttcccattacattaggctgtcccctccagcctaaggcaagagacactactcactgtagaaatgacaaatgagtccacagaagtgttgcaactgccacttccagacaggcaggaggggaaatagtattggaaatgctggcaatcttttttaatgtttttggataggcaaaacatttacaggaagaaaaaaaaaactacaaggctagaataaaacaacttattctacctagtcctcaagcagttctcttgaaaggtaaggatcttcatctgatcttcaagtatcttccagccttcctttatgcaaatacagtgcatatgaatgagtatgtgttgagtgcaagtgtgtgtgtgagtgtgtgtgtgaaaatgtgtatgtgtatgagtatatgtaagtgtgtgtgtgtgtgtgtgtgtgtgtgtgtgtgtgtgtggacagaatctcacatagccgagactctctctgaattcaccatagctgagactgaccttgatctcctgcctccatcctccaagtggtaggattgtaagcatgtgccaccacacacatctgaatatacatttaactttcttgtttttcacaaaatgtaatgcatcccaatattgttctataacttgctggttttccccatttgctgtttcgcttaaccaaagaccaaagtcctcccatgccaagtcacagagacttgcattatcttccattccacactgttctgttgctctgatgcccactgtactgatgcactatagcttaatctgttccaaagtgatgagcctttttccattccaaccttttgccattacattatattaatatactattccacacatacaccagcatacccatacaagaaacttcacacatggatgactagataaaaaagtgactgtgttttgctaaagatggccattggcagttacccccataagagaggtaccaacaggcattttgttagcagtatagcatagtgcctgcttcccagagcccttaatagcaagggtatgtcaaggctttgagatcctatcatccctgagctagaccactttcctaatccatgtggtattaatttacattaaggggccttgtatttccttttgaagaactctattttcgtgtgccttcacccctttcttttctgttctgtaatttcccttattttacaggaagaaagaaagaaataaggaaggaaggaaggaaggaaggaaggaaggaaggaaggaaggaaggaaggtaggaaggaagggggaaagaaaggaaggaaagaaagaaagaaagaaagaaagaaagaaagaaagaaagaaagaaaaaatagcactgaggcttagagtatatgaaagcatgtgatggaacagtcttacctgataggaccaggactgaaatccaggtctatctcctccagaccctgagagtttagccattaacacgtatattctttgtattatttatccctattattgtttaagttttagtttttgagacaaagtcaagaacagcccaggctgaccttaaacccaccatatagctgagactggccttgaacacttgatcctccagtctccatcttccaagagctaagattacagacatgtgacaccatgcccatattgtttttgaactggccaagagagttgtccactcagagcgggtgatgaacctgggggacactaagaaactgggtgatagagaaagccgtcggtgacaatgtttccaagacacaaccatctgtgcaaaggcaagaatggcctgcagctcttcccactggttttacggagcctgccttctgcttctacccatccttctcactctgatgtacaaccaacctaatcctaaagcttgttgcaatagcctgggtgaattcagttccattgcaattcttttttccctttctgagatttgaatgcattccaattagaaagaaagttctgttgtaagtactctgacaatttgtctttaagaccttagctagggcttagggttatgatccaagtggtggaatgtttgcctggaatgcacaaggccctgggttctgtgcccagtactgaaggaaaaatagaccttagctgatactgattaaagagagaatttccttcagctcaccttagaagtcatcccatttctggagaatatgagaaggaaaagatggaaggaaagggaggtacagcttttcctattgtcttttcctgtgaaacaatactgccacaaagttaggagcctaaaagaacacatgccatctcagcttctgtgggccaagaatctgggcatggtttcaccacactgtcaaggtgtatacacacacatctaatcctagcacttcagaggctggggcataaagatggggcatcaaggccagccactgctttcgctactttctcctcatatctcacaggcaaacaatgggatttagtagagtactttataggctgtggtccagataatccaacaagggctgcctcccaacagaaagcccaagagtccatcagtttttcagttctaaagactggatgtctcagctggtcttcagaatacattggaatcctcaaaaagcaggctctggggccactgaagagaaagcaaaggcaaaagctactttcttccatgtcctttatataggctgccaaaggaagttgtgacccagatttaggatgggtcttcagactaaaatccctcacagttgtgcccatcaacttgggttttagttaattccagatgtagtcaacttgacaaccaacaatagccatcaagcaagtaaaggtgcttgctgccaagcctaacaacctaagttcaattcctgaaacccacactgggaggaaataactgctttgagctgtcctctgacctccatgcaggtactaagggacacacaagcacaaaaataaacaataaatttgaacagaggacagccaaggctacacaaagaaaccctgtctcaaaaaaacaaaactagttaatttaacagagagaacaccatttgtcttcctgagtcttcagtagcatccattttcctgcaaatgtaaatgttatgattccattttttctttacagctaaacaaaatacacatatgcttgtgcgttttatttatccattcatctgttgatgtgacagctaagctggttccattttttagcccttgtgaccaaggcagcaataagcacagatatgtgaatatctctatggtgtgttaactagttgttcttctgtttatacacaggtataacatagttggtcacatgtagttcaatttttagttcctggagaatctctacagagactttcacaggggctgcaccagtttacattcctgacagttgtggataaaggttctagctgaggggagttctaaccaaactattgaacaaatgtgccgcttcctacagacttgtagcaaagcttaagaagagaaatgaagaaagaattgctaaggaaaaagaagatggaacttaaagattcagaaaaaatctcagggtcttcttactctaaataatagtaataataaagaaaaagctgagaaacctcctcaggaaagagccccaaaagtgtggttacatggccattaagtggagatgaatacaactttgaagcaagccctccaactgaaacactgaggagtgtagatgggatgaaatgagggaaggctgagagactcctggagaccaagactggaccacagagctgtgtgctgttctccataggaagggttgcctctttggtttcaaaatatatggggatgggtgactgtggaagtagataggggtgacatccatcacctaggtttccacaggctgcaatgcactctgggagcagcagaagcagagttgcctggagcactcattttgctgtactcctccttcttcactactggctttaaagacaacaggaagccacactgaagaactgtgtgaggcaagcatctgcaactgacccagagatgctaagggctgatacctctggccaagatccagcaaagaacccagcggggtcctcagttcaaagcccagagccagtggaaggagacagccaactccaaagacgtcctctgacttccacacacatacacaaaataatagctaatctttaaaaacaaaaagagaaagaagaactcttggagaggagctagggaaccagcaagggatggataattgcaaaggaggaaggcagtgagtgagggaaatgaataagaaaataaagtcacacacacacacacacacacacacacacacacacacacttgaatctatatacgctcacttaaaaaaaaaaaataaaacaggctcctcagctaaatatctaactttactgccttccaccaaatgccagaacatgaaagaactgcaaaggtgtcccctccacttccagtggcatactgctcctttcgcccatctgagacgtcaccagaatgatctttcccttcttattctttccaacaccctattcatgattacttatgcattttccaggaaaattgaagctttcttcagagataacttcctgtctttctgagctcttgccaaacaccatttagcagccaaagatacccagcaatctcggcttttctgagcatatgccttgctctcagttcaaggcctcttccacaagttcaggtatttgtaagaaccacacttcttgtttctgattttgcttcagtctgcctagactatcacaacaaaatgatatggtttagcaggtaaagctgcttgtctccaagcctgacaacctgagttctatccccagaaagtccaaccacaccagatgtcgtcagactttctttggactgacagctccaaaagaatgacagagacttcttcctgagtatgaaagcttggccttagcttaggcttgttcccaactagctctgataaatcaaattaacctgtttatattaacccacattctgccatgtggctcattacctcaacttcctctgtgtctccctggcatattctctgcctctcagattcttcccagagttcctatcttttcctggaaatcccacctatctcctcctgcctagctattggctattcagctctttattaaactaatcagaaagtgccttgaagagacacatcatcacagtgtacaaaaagattatcccacaacaatgggagaaggggagacatgactcctgcaagttgtcctctgacctccattatctgcaccatggcatctgcacagacaacacagacacacagacacagacacagacacagacacacacacacacacacacacacacacacacacacacacacacacagcaatataaaaaatttttaatttaaatttaaaagccaataaactgagtagttaagatagcagaaataccttttcacagctctagaaaattgaagtctaagatcagatgccagttccctaacttttatccagccccttcatcctcatatgaaacagaaagcaagtttggatctgtcttagccagtgtgaagagacaccatttccatgcccactcttataaagaaaagctttaattggggcttgtttacagtttcagaagtttagtccgttctcatcatgtcagggaacatggcagcatgcaggcagaggtggtgctagagaagtagctgagagttctacatctggatctgtgggcagcaggaagagagaaagttactaggcctggtttggtctcttgaaatctcaaagcctaccccagtgacacccttcctccaacaaggacaggcctcctaatccttctaagtaatgccattccctgatgactaagcactcaaatatatgagcttatggggtcattcttattcaaaccaccacattccactccttgtcccccataggcttgcagccatatcattttgtaaaaatggattcagtccaacttcaaaagtccccatagtctataaacaatctcaacactgtttaaaagtcaaaagttcaaagtctcttctgagactcatggcaatctcttaactatactccctataagatcaaaaaggcagatcacatgcttccactatagcatatacattaccattccaaaaggggggaaaggaagcatagtgaggaaatactgggacaaaacaagactgaaaaccagctgagcaaattccagactctgcacctccatgtcttgtcagagcactccagatctctatctaactcctttcaaccttgttgactaacaacatgcttctctctcttgggctgcttccactcctgttagctcaccccagcaggtatcccagcactctggcacctccaacatcttggggtctccaaggcaacccaggcttcaccttcatagcttcacaaactagcctctcagggactccatacagagacgaccctgacacatgcctggcctcacctgctttccttagcgatgaggggagattcccccaccccctttctcatatccatgactgtaaggctggaatcatgtggccaaagctgccaagttctgctgcttcctggggctggaatttgcccccaccccagcccatgttcaagtacattttcacccaatttctgtctttgatggtttcttccactgcttttttcttcatttcttttcacaagttggaagctcagctaggtggggtattgacctgaggtcactactcctcttatgccacttagcatcaggcttttctttaaactttttatctccttgagcactgggcttggctccattagacttccgggtgctcctttcctctttctattgtacattcgtgtttttacttgctcagctcgttcctttttattatagatctgcatatgagtggccattaacaaccacatggtgccaggtgttgctggcgcatgcctttaatcccagcactcgagaggcagaggcaggaggatctctgtgagttcaaggccagcctgctctccagagtgagtgccaggataggctccaaagctacacagagaaaccctgtctcaaaaaaaaaaaaacaaaaacaaaaaaaaacacacatggtagagtctcagtgctagaccatcttgaaatctcctctccaatgccattagtccaaaactctccaattccgccttgggcagattttttggacaaaggcagaaaacaagccactttttttgtcaaaatgtcacaagaatgatctctaagtcacttataaatattcttctcctctgaagcctcttcagccatgtcatcataatctacattgctctcagcaccactgtctcccacattccaactagtgtggaccatgtcttagtcagagtttctgttactgtgaagagacaccatgaccacaacaaatcttataaaggagaacatttaattgggtggcttacagttcagaggtgtagtccattatcatcatggtgcaacagggtagcatgaaggcagttgtggtgctggagaaggagctgaaaattccacatcttgatctgaaagcaacagtaagtgaactgagacactgagtgtaccctgaatatgggaaacctcaaagcccacacccacagtgacacacttcctccaacaaggccatatatattccaacaaagccacacctcctaatagtgccacacatatgaggttatgggaaacaattacattcaaactaccatagaccattaagcaaagcttaaagcattcaactgctttcctaatccaaaattccaaagtccacattctaccaacaagcagcatggtcaggcttgtcacagcaataccccactcctggtatcaatttctgtcttaattggggttcgattgctagaaagatacaccatgaccatggcaactcttacaaaggcacataaagcccttcctcataaaagccccaccctcctcatttcacctaagcctaattgcttccagctaggttgggatagggtttcagagtatctacctcaaggtctatgtgatgaaggcttggtccaccacattctattgggatgtaggggaccccttcggacctaaaagatgttccttgggccattgggattattctgccgagttctgtgactacttggcttgttctcatagccccgtctgcaccaggaggcaatgtactcaaggaaccaccctccatacaaagcctgcattgtgccagtgggactttcatccactaaaactgattctaaatagacctcttctgtcttcatacgtggcctgtgtcagtattctctctctctctctctctctctctctctctctctctctctctttctctctctctctttctctctctctctttctcgtgtttcaagacagggtttctctgtggcttttagaggctgtcctggaaccaggctggtttcaaactcacagagatccgcctgcctctgcctccacagtttggattaaaggcgtgtgccaccactgcccagccagtattttcttatagcgacaaaaagcaacctactacgcttccaaaaatctgtttacaaaacagtgcttctggggacatacagacatttggactaccctcaatgtgagtgcaataatgttcacagtctgtgtaggcacctaccacaaaatcacaaacaaggcagcttaaaccacagacatgttttctcttgcagtccttgaacctggtaggccaagatcaagctgtttgattttctccttgccttgaacatggctaccctaatgctctgttctcagagaacagcccttttccacatctggtatctcttcctcaccttcaaagaatattggcctattgaaagttgggcatgaagcctataacgcaggtgactggacaggaggattgtgagtctaagaccatcttcgatacataaaacatgaaatcaagaccagcctgggcctagtgaattccaagccaacattggctactgaatgcatcactgtttcagaatatccaaaagaggagggggaaaaggaccagctatgcttgattaaggtgccatccttaggacctcatttaaccttaattatccccccataatcactctattttagactggaaggtattgctgaagattgagactatgaagttgaaattcctctgtcatggcacacaccaggcctgaccctctgtcttggcacacaccaggcctgaccctctgtttaaatactgtcacattggcagttagagcttcaacatacagattttgagagacagttcaatccctaacaatgacatgccttcaccacacagcgacatcaccaggcagcaagacaccatgagcactggagggcccttctggtttgcctgtttcttgtcatacccactatcactaggtgcttttatcctgagtacattcacagggcctgcatatgcatccgtatctgtgtgtggtacaagctccaaggccttgtaacagagatgatgtatccccactgaagagaaatgacagtcagagcgagaagaaggagccaatttgtcacttactgcagagcctgctagtgctgcagcaggcgcctcacactgggattgattacaaacaagatgacatttccctgtgggctgcctcacgcattattataaataaataccactccctttagcatctgcacggctatcgagaacagattctcctcttgatgccctaggtgcacagtaaatatcccagggaccacaatggccttcttcagtatataagagggacattgtttcacatgagacagtttcataaattaaggctgtcacacaactccatgagaacagaaaacatacacagagttggaatgaccctaggaattcatttccaagaagggttagctttaaaccatgctgaagttctgttccaaaggcctgggcagatggatacaggcctggaaacttgtgatcccaacactcagaaggaccacaagttcgaggcctgagatccacagtgataccttgccaaagaagaagaaaggaagaggagcaggaggaggagtaataggaaggaactacacaacctacagctcaacatctgtttggagtttgttttggtttgttggggtttttttttaattattaatattttttttttatttctcatcagctcaagagaatcagttgttttctgggagtgtttcctgaaaatcacaatgggatttttaagatggaaataaatctgttaaatttttgaatatctctctggccttgccctgactgttccaaatctgtcatcttatgagtttcaaataaataagttattttaaccaacgaaatatagagcgactgtcttctatttatttccttatgctttgcttcggtgcaagggtgaatttgatctgcctgcggattttttttttcatttcagtatctatccactcattttctatctgcccctccaccatctctcaatgttttcctgtcttttcaatcttttcctcctacataaacccaagagagggttggcatctgtgtttcaggcgtaacatgagtgccccctgctgtcaagaatggtgaatagctccgcatccaggcaggttccaaccaatttggcagatgggaaaaaaactacatctcaaggcaaacactggaaggattgttaaaatgaataatttattaaatcgcgattgtttattgaccggcctttcattatttacttttcagttattaaacatacccgtgaagcatctgggtgtcagcccttggcccactccaagcctttttcccaggcggagatgttgccagtcccttgcttctccctacccaagacattttcgatctcttttgtcaggtcggggtcaaactacagttgttccatgatgactttatcaattctcagttgatagactctaaatgaaaaactgcccgctgctgcctcgcagccacttaagaagggggttatctgtgtaatgttctgtcaatcgagcagggtctgcgacagacgcagggagtcaagtgaaatagggaaaagatgtttttaatgccttttattagttagtctctgtccgccacatcgaagactagctgacatccatcctggactgtccttccaaatcaaaaagataagggaaggaatgtgagcgtgtgtgtgtgtgtgtgtgtgtgtgtgtgtgtgtgtgtgtgtgtcactcttttctgaagaaagtcaacaatatattccttaggtaattaattacactagtcatcacctttcaccttgaagtaggtcaaggtcaaaaacaacaggctacaatgggaggagcacatcccaagaagaaaatctccagatttgaagagatatgctattctgtaccagggagtccttgcttctaaaggacaaacttgtttggtttggtttttatacaatatgttctgaccctacttctcccctctctcagctcctccaacctcttcctcagttttaccatgcaggagttccaaaacgtgtgtgtgagagagtgtggcgctcccaaaataataataaataaataagtgaacctcgagtcaaagaacagagcagagattaataaatgtcattctacaaacccgaattttaaaacgaaccagaccaagtgaggcggttcagtggggaaaggtgctcgccccgcgtgcctcaggagtccacatcgaaaggaacgaaccaacttctctgactttcaaagcccaaatccaaatcccatcacaaactattaataacaataaataatttttaaggagaaaatggaaatcccagttggtaatggcggtactgaagctactcacaagcataagaaagtctctctcgccggacaggcggtggtggcatcggaagtgtttaatcccagaactcagaggcagaggcagatggatctctgtgagttcgagcctacagagcaagttccaggacagccttcaaagctacagagaaattctgtctcagaaaaaagaaaaaaaagaaagtctctctctctctctctctctctctctctctctctctctcataaaataagttgagccatttctgaataactcaatagagatctacatcggtatgagaaaaattatattatcagatgtttgaaaaagttaacagtaaataaaattagaaatgtcatcaaactatattccctccctcaaattaaatatgactttaaagtatggtttacactttggcatttttctctcttagcactgagcgtttacaggctttgcatccagaaagctgagggaaaactcagaacagggccagggaaagatctttctgatgagaacatatgcccagccttcagtctgcctgctacatgtacctctgatgtctaggaatgaggcttgagcatctttgtaggatcaatgccatgtcacaatgtcaaaaggttggacagcctcggcttatgccaaatagtccagaaagttcgtaagagaaaaatcattttagtagccaagagccctgaacttgaagtgaatctgatgctctggcttgggttccagttgtgggttctccagatgtgtgacttgaacgtgtcacatgtgaagcttcaatttccttgttggtaaattaagctggtgtttcttccttcataaaatcaaatgggagttcatccagtcgtgcaaataaatatctaacacaattaggaccatcagccatacttgatatatgtgcagagccttcactttctaccttctttctgtcccagaagccatactcaagaaagggggagtctttgggccaggcatggtgaggcacacctttagtcccagcataaggaaggcagaagcatatggatctctgtgagttcaaggccagcctggtttatacagcatgttccaggccaaccagtctacacggtgagactctgtctcaaaaaacaaaaacaaaaacaagaaaacaaaaatagatggggaggggtagaggagagagatcctaacattaaagaaggaaacagtcattacttcctaggcccatcgatttctcctggattgattaaccatttgcctgccagtgtctgcagtgaacaggtgtgttctctctaaaagaccaaggcaggtactcaaactgccttcacagatcactccccaccaccaacccacaaaagccaggggtggaacccagggcttctctcattccaggcaagcacaactccagccctgcagtcagtgatcttttttttctgtcaaatagctccccactagggaattcttcaccagtattggtttctatttgttcaagctaataaaacaagaactaaagtgaagaaacttaaatgctaagttagaaatcattataacagaattgttctaatcttagcattgcactacaattgaaatgtttagtctttccattaagctctaacaatgactaataattacccaagtaacaacgagcaacagagacagctagtttttaaatggtcaatgcaatgatgaagacgtgtgcataaaattatgggagtagcagagaggaatccctgtcctggctgaagggctgaaagggaagaaggaagcaaggcaaccttcccgagagactcagctgagccctgaatcttccttcagctcagccctcatctcaacttgtaataaatctggcacaaatgtgtccaaacctatctaagggtttgtaatggagcaccccccccaaaaaaaaaacacacttcaaagagcacattgttacacatctaagaaccgaagtcacctgcaagcaaagtaaatgatcgaaataatcaggtttgagattatttgtatttcttcaaagcaatgagggattaaaggagaagagtgagaagtggagggcaagggggaggcatagatgaagaaagaggagcaggaggaagactgaactggtcccccacatagaaaccccaaattcacttttatacagagactgtctcttcccataatgcaattccaccctgatcagcactgacagagagcaaatcaccatgaaccccagcacttctcatgatctgtatcagaggaatggaggatatttatgctttgaaatataagtgctttgaaatttcctgaatgatgatgctaagtgcaagatgttgctattatgtcccctgcatccttcctcagggccttcaggagactttcagatgttgggaaggtattataatgatgtgggggtcaaggaaaatggtaggcaaatgttggtacagacatctacaaacaatacccatgtcatcttttcaaaactacatttcactcactccacagcaaaggaattttttataagcttggagagagtgcagtaatacgattgtctggcagaggctgctttcttccccaccctctgtagggatctattaaagaagcaggaaatggaaagagaggcagtgcgtgtgatggatgtcacttaacattactttttatgaagttctgcaaaggcccttggtataggcagacgtggaacaaggtaagcacataaataaacgatcaccctgcattccagggtcatttgcctcagccctttttgtgaacttgctgggacttagtgaggttgcaagagagattctagaaagagtataatatgatcttgtcacagtcccaatatgtggaacaaaacaaaacaacaacaaaaaaagatttgtggcttttgtctgcaagatctgatggattagggtgttagattcttcactgttggtaggggaaaacgaatgctccaatcccccatgcctctgtgactgtttcattgcgcttttatggatgcttttgttctgatctggaaagtcggtaaggctcagaccctccacaggccagtaatggagctatgagaagccacatatggccatgcttataataaactgtgctgatccgagtgtcaccagggaggatgcttagtaacaaaacaaactcccaaacaagtgatcacagtgccttatgcttgcacagtgtctttttgtctagaagcttctccaagcattttacaaacttgtataaagggtccctcaccagtcattgggatgcagttgcatctagggcagaataaaggcaacggctctgccagaaaatgaacatgctttcaagaaaagttgttttgtaggctggtgagatggctctttggcacctgataccaagtccgacgacctgaattcgatccccattcaatccccaggactcatttggttggttaaaggagagaatcaactcctacaagctgtcttctgacatccacacagatgacccacacaatgcatacacacaaattgtgtgtgtgtgtgtgtgtgtgtgtgtgtgtgtgtgtgtgtgtgtatacacactctccgagacaggattcctttgtgtagccctggctgtcctggaactcactctgtagaccaggataaatttgaactcacagagatccatctacctttgcctcccgagtgctgggattaaaggtgtgtaccatcactgcccggcttaatataattttctttaagttaaagaaaaaggccgttttgaaagtgtagctgtaaaatcttctgatttttcctttttcaggtcatgaggggaggatttaagctagtggacacagcacaggactattgtcttaaggaacaggatgggtattaaagaagctgccacacactcttcacccttcctaatgacaagatccaaaataaacaggtcaaataagtgtcccagctagccagaagtgtgtgcatctgccagagtcagggctaggtgacagaggccacattttctgggagttgtaagatggtgaggtctgttagaggtagaagccccagattctttatcagcccagctggcagaatcagtctcctcagaatccgtgcttaacccacaactctgggcctagtcaccagaaaaacctagtacagaagttctccacggggctagctttgtgtttgaacctacaggggagttcagactacacagggggttcaaggccagtgtggactacacaagactcaggcttgagggaaaaaaataataaataaataaataaataaataaataaataaataaataaataaataaatctcctcatgactccagcagcatccctcaagtcagtatgaataaggattataacctagagtcctgggcttttattttaagacagccattctttgtagattggtctcaaactcaaaatcctacctcagtctcctaaattccaagattacagttatatgccaccatggccatttgctaaacctgttcagtttccaaatttgaatattattgtcctagttttgctcactgtactaaaaacagtgtctaaatcccctctcctcaaaagcaaggtctaagataggctttatccttccattaaatgttgtgtctacagttcttgctaagctctggcatgacctcatgtttacaacacattaatatgcaggcttattctccacattctttcctggtggcaataattattatagacccagccaagactcactcccttatcagtttttccaataattctcacctgcaaaaaaaggcagttttatccttcttcctggcagaaattttgaagcaaagaactccagtgaattctcacctgacagagtttactgcatttttctgaacatactgcaagacatttattagtagactatgaagtatttataatggtaattaaaactaagctatcacaaatggagtaaacgcagagccagagataatgctgttactttttattgtgtatttgctcttcctgtaatctaatataaaaactccttcactaagttgctaaggcatttatcttaaggctgatgttacacaaatctgtttcccacaaggaagacccataacatatacaaagtcactattaaaagagttccaaggtagcaatgcatagaactctgtgtctatactgctgatagatataaatatagattttctttaagaaaaaaaaagaaggcaagccaggcagtggtggcacaggtctttaatcccagcactcggaaagcagaggctggcagatctctgtgagttcaaggccaacctggtctacagagcttgttccagccaaggctacacaaagaaacctagtctcaaaaaaaaaaaaaaaaaaaaaaaaaaaaaaaaaaaaacagatagaaaaaggaggaggaagaggaagaagaagaaaataagaaggcaatttgcacacggcacaaatattcacacctttcagcctaaaacttccactagtctttttcctaactaatcagactcaggcatggtagctcccagtaactgtagcggtgtaaaacaggcagacagatcttcctaagtttgaggccagcctagtctctatagtgagttcaagccagccagggctacatagagagactctgtctcaaaataagacaaagaagagaagaggggagggaaagaaggggaaagaaagaaagaaaatagttactcatgaccttagcatggtagcatacacctttaatccctggaattgagagactgaggcaggggatcaccataagttcaaagatagtccataatacaaagtaaattcctggtcatcattctgcgacacagaatgaggctttaaatttatttttttttaatctagatatgtagatgcccctcaactaaagaatagataaagaaatggagcagcagtttaaaaaagcaatgatatcttgaaattcacaggcaatggatgggactagaagaaaccatcctgagtgaggtaacccagacagcaagacaaacacagtatgtactcacttataagtgaatattagacatagagcaaaggattaccagcctacaatccacaaacccagagaagctaggaaacaagggtcctaagagagacatacagacccccaagaaatggaaagagacaagatctcctaagtaaattcggggtgtggggggaggggtgggagcgaagagagagaggaggagagaaggtgagggaagaggagaacatgagggaccaggaaggtctaattgagggaaggacagagaagaacaacaaggaaaaagataccttgatagaaggagccattacaggtttaaggagaaggctatcactagggaaatctccagtgatccacaaggatgacccccaaataagaatctaagcaatagtggagaggctaccttaaatgcccttcccctataatgagattgccatcctagagccttcatccagtagctaatggaagaagaagcagagatccacagctaagcactgggctgaacttgtggggtccagtttcagagaaggaggagtgatgagcaaaggggtcaagaccatgttggggaaacccacagaaacagctgacctgagcaagtgggagctcatggaccccagtctaacagctggggaaccagtataagaccgaactaggccccctcaaagtgggtgtcaattgcagagcttgagcagtctatggggcctctggcagtggaaccaggatttattcctagtgcatgaactggatttttggatcccattccctgtggaaagatactctctcagtctagatacagaggggagggcctaggtcctgccccaaatgatgtgacaaagtttgttgatttcccatgggaggcctcaccctccctgaggagtgaatggggggacggatggggagatggtgggaggatgggagggagaaggaactgggattggtattttaaataagattgtttttaattttttttaattaaataattaaaaacttaaaataaaaaaactagatatggcagtgcacacctataatctcattacttaagaggtagaagcaagaaaaccagctcaaggtcctccttgacctcatagctaatttgtggccagcataggctacatgagaccctttctcgaagaaaaaaaaaaacaaaaaacaaagatagatagatagatacatacatacatacacacacacacacacacacacacacacacacacacacacatgtgaaaaactagaattttatcaagcaatattagtaaatcaccagaacatgaatgctgagctggaaagatgactcagtgggtaaaggcacttgctgcaaaacccagtgagttcaatcccagacacacgtatgtatggtaaaagaaaagagctgactcctgaaggctctcctctgacctccacacaaagacccacaaataactaatgaaactgtaaaaggaagacataaggttgagaacaaggcgatgacacaggcctacaatcccagcacttagaccaaaggaggagaagctaaagtacaaggcaatcctaggcttcacagtgagacaagagatggatggaggtcaattgggatcagtaaaaagcaattcggtctcactaaagattgagacgcacctgaatggtctaaattcaaagcacctaatgaccccaaattcagtaggatgtgtgagcacacacacaagcatgcattcgagtgcacacatgcagctacagagcagacctcaaggttactccagcttgtctttgctacacacacccctgtaataggcatagttagcctagagacctccaacaaacaggttcttctgacaacactagaaacaagatttaatttaagttggttttaagtctcttccattggccttgggaataaaagacagcaggctcatcattcatgaaacacttattgcttttgtcatcaaatccctgcaaataaagaattttctctctgaaagtgtcattctttgggcttctttctcctttgtcatccagttggaagattcatacatagctttcctgttggaaaatgctaattaatggagaaaaagagggggccccctttgggctggtggtgagagtcccaggtggcagcatccccttatgtcttcatcagtggctgaggaaacctggagggcacgcctcctttcagcacctctcacacacctgcctgtattcccaggctttagggcagggatagaaaggctgccaccaaccttactcctctttgctgtaatggtttttgaagggtctctttttcccaaagaaataatgaatgcctctttgcaaactgtcggggaaaacgttctgtttggaggtaattgaaaatatgtttttgcagccgcttctgaaccattttccaaacagctttcctttctaattaactcacaatgcttagctccgtgattcaccgggtagacagtgacatctagtgtgtacagacagagttgggagaacgccttagacacagatttgtaagaacaaccaaaaaaaaaaaaaaaaaaaaaaaaaaaaaaaaaaaaaaaacgatacctctattccaatgcgggggattgtcaaaatgcaaatttggcatcatacaggtttgtaagcacttgaaattatcaaaggagtgttttctctttagacacttagaaaaatctggatgttttaaggtacattttagcccagcattcctatcaccccagcacttgggagataaaaggcaggaggcgcaggagttcaagggcagcagctacactggggaattcaaagccatcttgggctacataagaccctgcttcaaaacacaaacaaaaagagccacattttatctaaagaaataaatgacctaaaaaaaaagtagtttgaggatatgatgaagtcattacacttgagagatgaaatataacttttccctgagttcagaaaggaactttcacttgaaagtgaaaatgaaaaggattgtgggtgatcagctgcccctggatgttacaggaatttccaagctttgcaggtatacagagaaaacctttagtagggggctggacatctagctcaattgagagagtatttgccagcatgcacagagccttgcattagaactccaataccacaaaaaccagccatgacaatacaggcctgtaggtgaacactcagtaatataaacaggagagtccgaagttcaaggtcatgcttggcaacatagggagttcaaggtcagctttggctaaatgagacccacatttaaaaaaaaaaagaaagaaagaaaagaaaagaaaagaaaagaaaagaaaagaaaagaaaagaaaacattctgcaactgacctggacatttcttttctgacagctagctttcacagcaccaaaggaaggctctgttcaggctgcggaggcagaaaagacatcaatggtcttatccggcagtgacttccgggcagggtgtgcccactgatgcaacagcagaatgaatgttcaagggaataaccaactgctctctgactacatgagaaaattcatgcctagttctgtaatgtggtctaaaggccatggctgggaaggtcgttgttttgctaaaagtcaaactgatttctcaataattatgatcataactttagacagtgctggtctcaaccttggtcagagaagtttagttttacattaggcagcagttaatgctcagattcaaattggtgattgctgggtactcacccctaaacagaacaccagcatcatccaaggctctgggaatattttggaaaagggagtagagagaacgcaagagccaggggagtgggagggcactgtaaacagctgtcttccggacatgcatggccattatgctcattaactcacagcaactgtggttacctggacaacacttgcataacactgagcccagtcatactttgtcatgcatgaaggaagcacatgaactagctgaaggactactgcagttactggtcactgacagagacagagacatttttctctaggggtaaagccagtaatccagtaaataaacccatagcaagtgcatgcaaccaccataattaaacctagttcttagttaaattgaattttaaagacctattttctttttatgtgtttgtgattgtgtgagtgaataccacatgtacaagggtggctaaggaggccagaagatgccagatcccttggagatcaagttccaggtggttgtgagccacctgacctgggtgctgggaatcgaaccctagtattttggatgaccagtaagtgcttttaaccatatctggccatctccctttccccattaaattaaatatattttttatttatttacttacctattgtataacagaagatcactgtcactgccaacttagcaagcacaaatggccaacacaggtcatatgtactgtggtgaatcatggaaatccctgcttccaaatataaacatgggaggtacatagaggagggggtcttacaaaaacataaaaaataaaaaaataagaactttttaaatgagatggatcaaattacaaacaaaagcctggcagggtggcacacacctccaaacccagcatatagaaggttaaggctttgtactggtttggtttttgtttgcttctttttgtcagtttgacacaagttagggttatataggaaggagacgtctcaattgagaagatacctgtgagattggccggtaggcaagtctgtagggcattttcttgtctgatgattgatgtatggttgcattccatagcttgctgggctgataacagaacatgaagcaattgtgagcaattgtgagcagtgtcacccccaggcaaatggtcctgggggtataagaaaacaggtgcaacaaaccatgaggagcaagccaggaagcattcctccacagactgcttcagtgcctgcctccgggctcctaccttgagttcctgccctgacttccctcaacgagaaactgtgatctcaatgtgtaagccaaataaatctttcctccccaaattgcttttgggttaaaatattttatcacagcaatggaaagcaaattaggacaggcagggaacctgaattccaggccagcatgggctacataatgagactgtgtcttagaaataagaacaagccaggcatgagggctcaaagcctagtacttaccaggctgaaacagggtgctttccagcctatgccatgtagtaagtttcagactagcctggcctataattgcaaccctgttttaaataaaaataagataataataattttaaaaagacatgtatggatagaaagaaaaggaatttggggtaaggaaaatatctctctctgtctctctctctgtctatctctctgtctctctctgtctctctctgtttctctctctctctctctctctctctctctctctcacacacacacacacacacacacacatacacacgaaaatcacagatggtgaaaagatctaaggactgctctgatcaaagagcacaaataagttgacaccaatgccagtgttaggtaactaaaggggagaggcagatagtgatgggggcttctttctgtctgttttgggtttgctttcttgagacaaggtctcagtgtagctcaggatagcctggaactcactatacagtcctggatagcctggaactggtaacagtcctgctgcttctgcctccatagtgctggaatttcaggcatgagccaccttgcccagctcagaagatggaatcaatggtatcatctcacagtccctcaaatgcctacagaagatccccaggggatccttggtgcctgtgacatggctgtatggttgcattccatagcttgctgggctgataacagaacatgaaggcaaaaaagaatagtggttagcaatcacctatgacagctaaggaggtagggcaaacgtgtcactgtcatagcacaggactggacaatggccattacggttgtggcagagcagagccatccatctctgtcctcgtccatcattgagtgagctctatgcaagagtctctccctcttcagactgaaggagaaaaattgttcatggtgaaagtcactatctatgacctaatctgtcctgcttctgggaaaagagactttctaaacagacctatcaaagccaggtcacctctgcttgctgaagtcaagactcctcacttaaaacacccctgttctaaatactgtagtgacttctgggtggaacagtaagttagaaacctcccagataggccactgagatgactcattgggtaaagtaattgctgcaccaccctgataatctgagttggaaccctggaacccctggaaaggggaaaggagagaacaaatattctcacatatataaaataaaataaatctaaaagaaaaaagtggcaggaatgaacacagaccaaaaggaacacttacactccactgatggcaatgtaaattagtccagccactatgggaattagtaaggagggtcctcttccatatgacccagttacccatgtcatacccatggcatacatctcagaggtgtttgcacatcagtgttcatgatcagccatttgtatgcaaaacccagacttgccgatttcatgaggaacaaaattgaacccgagataggttattaactggtaattcattgggaatatatactcacatgaggaatcagtaaccagatttggcactccgagaagtcaggacccagatgcttccaggagctggctgaaccctgagagagagcgctaagcgcctctggtgctctctctttatcctaccctctacatactcaaatgggtgtggtcagcagtataggtaaccagggtctttccctacaccccttcactagtactttttgttaataggcaaacttaagtattaataatgatcaacagaatgataggtctcttcatccttgataaaagagtaatacaactgagttaggcaggctttagaaaagatgaactacattgtaaagtaaatttcactaaagcataatattaaatatatgatgtttaatatgatggagtgttactggatagagcaaccacactctaggagtagatggccaacacaaaacaaactcaactgtatttttgtggatttttttgttttgttttgtttggtattttcttatcttactggtctttggcttattcgttgttttagtttttgttttggtgtttttgtaggggggattgtttatttctgctttgaaagagagagaaagaatataaagttgggtgcataggatagtagggaagacccgagagccgtgaggggaggaaaaacatgaccaagtgtgttatataaaaaccatttgctaaggccaagcagtggtagcacacagctttgattccagcacctggaagacaaaagcaggcagatctctgagtctgaggccagccttatctacagagcaagttctaggacaaccagggatacccagagaaaccctatagggaggagttaaatttaaaaagaacaaaggttagagagaacagttctgcgacacaggcttttttattttcctagtaaatccacttttgttttaatgagagccagtctgaatgaagttctgcagatcatgtaagaatgccttcattctcacggggtacgtgatccaagcgaaaactggacctcacccaagagtgatcacattcagaactctgggaattatgaaaggttcttaaatgtatgctgaagaaagtcaagggtggactagtctgagggaaatgagaaagacactgacctattagaagccagccaagtcagtagccgtaacatactgcacccgccaggattttaccagacagatttgccagactgaaagagagatttattgcaaagacttggcttatgtaactgtggatcagctaagcgggtccaaaatccatagggcagatggcaggctggaagctgcagacctcatggaaacttccagttctgtttttaaggcagactaagtctgccttccagatcagtgaccatcattcccttttcccaaaactgatggattgtataagtacaaaattacctcacagcgacacctaagttagtggggggctgaacaaatatggattatagtctagtcaagttggctaccaaaaaattattaacaaattgctagtgttgttcagtgtgctaacaagcagattgcaaagatgaaaactaactacctttgacccagtttggctagcaaagcacagaatagagagttccactgtagggatggagtgagaggtggagaacttcgtgcaacctgagtcaggagcccacctatgctgcttccttggccttcctatgtcttaactgcatcaacagtaaaataacaggacctgcctcatctcagctgtgacgcttaaagtggtaaagtgcatagaacactactagaaacatagcaagtagttaagtgtcaacactcatcactggcattacctggtatgactcctgggggatgggtaaacttaatcctggagtatgtgccaggcataagaaatagaaagtacaaaggcacaaaggcatacctgttatgcctgaagaacagccaacgaagccaggacacgcactggtgagaaagaaccaggttggatcggttggttccaggcggtctgcaagacagtgctgaatgctgtggaaaagaacaactttgttctgcagcaagaagtctttccttacacacacacacacacacacacacacacacacacacacacacacacacaccaaccaaatcctcaaattcttggaatcccagacttcagctaccaaggcgcatcaatgaggctacatgtgaatattacttcatctttgaggcactgagtgtctgttctgtgagtctgccccccacaaacagtcatctttacacagctatggaggattggttctcagacttcccaaaatcctgggatacccaagttcctcttaatgaatagtgactcggcacatgactcagccaggagagcactagcacagcaaacaagaagccctggtttccttccccactgccatataaagtgggcagcccacacatgttatcccaggacttaggaggtagaggataaagttcagtctctgaggctagccagggacacatgggtctctgtctcaatagaaaagcaaaataaaaccacccctgggtgaggagctattaataactgatggctcctgggggagacaaagacagttttctgtaagagtgtggcctctggtggtttgaccaccatccagtggatggccccatacccatagaaaaatgggtagcagaaaactggactctgtgggttatttttttttaaagaagacatgaagttggaagggacaggaagtggatctagcaggagctaaggataattacattatattgtatgcagttctcaaagagtaaaaatatattttaaaatggataaaataaaagggcttccatataacctacaaacatccacctatgttcattttatgtgtgaggtgctttgcctgcaggtatgtctgtgtgctacacaattacctggtgcccctggaagacagaataatgcaccagatctcttggatctagagttcgagagagttgtgagttgttatgttggtgctaggaattgaacccaggtccactggaagagcaaccagcagtcttaaccactgatccatctctccagccccaacctgtgttctttaaatcatctctagattgctataatacataatgtaaatgcttattgagttgttatgctctattatttcagaaacagtaaggagaaaagtctatataggttaatacaaatacttggtcaaatgtttcccaagctattttttgaacccacagatgtgggattaatatgtccaagcattccatagagacattaatgtgagttttccattcaatcttggtagcaatttactgacaccatcatggatggggcaggactctaaacataatcctgaatgcaagacctaacaccacttcagttcttcatgcaggatcaggatggctaagccatatcaaaaccatctgattacagacaagtaaaatcatacagacccaatgaatcaaagataactgattgtctccacaaacccattctctctacctggctatatgaccatgttataatgtacagactgcatttccaggcccttctcatgtagatgaagccagataatttgtcaccaatgcaacatgagcctaagtgatatatgcatcttctagacatatatgcttggaccttagaaaactcacatgtgtactccctcttctatgtccctcttccctcaaccagtaatactggcttttgtttttgtttttgtttttgttttttcagacagggtttctctgtgtagccttggttgtgctagaactcgttgtgctagaaccaggctggcctcaaactcatagagatcgatcctcctgcctctgtctcctgaacactggaatcaaaagcatgcaccaccaccagcagcttttttttttttttaaatacagggtagcatgtgtggcaggctggccttaaactcactgtatacctgaggatgatctgaaactcctgatccacctgtctccaactaacctagtgctggaattacagatgtgcaccaccatgcccagctcagcttcctacacaaaacaaaacaatgaatataattaaattcccaggcaaatgacctcgtccaggaaacacccaagtccctgctactgcctcagcaacaattcccagtaccagagtcctaaaggtacctgagatacctgtgactgctctaaggggactgggattagaaggtgggaacgagacaggacttaaagaggagagaccagggattgcagctgaggtggggccggtacaaacagagtccagtgtgaaccagtgtgggtcacctatgagggttcacccctatcatcccagcattcaggaagctgaggaggaggatcaagaaattgtgccagagcctggtgatggtggcacgtgcctttaattccagcacctgggaggcagaggcgggcgaatctctgagtttgaggccagcctgtgctgtagaataaactttttgtacactgtgactaggtgtcactcagattgacttaataaaaagctgaacagccagccgggcttttccccagcactcgggacgcagaggcaggcggatctctgtgagttcaaggccagcctggtctacagagctagtgccaggacaacctccaaagctacacagaaaccccgtctcaaaaaaaaaaaaaaacaaaaacaaaaacaaaaagctaaacagccaatagctaggcaagattttcagggcagagagaatgctggcaagaagggcagagaagccagacagatgagggatgagtcggacacacaaaatgggatagagttaaaagccacgtaggttaatttaatttataagagctagctaaaaacaagcctaagctattggctgagcattcataattaataagaagtctctgtgtctacaaagatgacaccagctaacaatctaagcaacaaaggagaggctaccttaaatgccctcccctgataatgagattgatgactgacttatatgctacctgatagttctcatccagcagctggtggaagtagaagcagacagccacaactaatcannnnnnnnnnnnnnnnnnnnnnnnnnnnnnnnnnnnnnnnnnnnnnnnnnnnnnnnnnnnnnnnnnnnnnnnnnnnnnnnnnnnnnnnnnnnnnnnnnnnnnnnnnnnnnnnnnnnnnnnnnnnnnnnnnnnnnnnnnnnnnnnnnnnnnnnnnnnnnnnnnnnnnnnnnnnnnnntagaagcagccacccacaactaatcactgagctaaactggaatccagttacagagaagtacgagagatgagctaagtcatccagaccaggcgggtgaaacccacagaaacagctgacctgaacaaaggggagctcttggtccccagactgataactgtgataccagcatgggactgatccagaccccaggaacatgggtttcattgagaaaacctcggaaatctacaggacctcctgtagtaatccagtacttatccctagcataggtatggactttgggagcccattccacggtaggggtcgggggtggggggtgggggtgggggggaggtgagggggggggggggggggggggggtcatgtaaaacaatcttgtttctaattcaaattttaaaaatgtaaaaaaacaaaaaaagtctctgtgtcaatatacactgaactgaactctggaacttagttgcagagagggaggaacgaagatcaaaggggttggtaccagggtggtgaaacccacagaaacagctgacctgaacaagggcctgggaggtcagtacaggactgatgcagacccctgaacatggatgtcaattaggaggcctcctcactctggagggcccctggtagtggattagttttttttttccctggtataagaagggatgttgagagcccatcccatgtgaagggatgcactctcggcctggacatatgggggagagcctaggcccagcccaggatgatgtggtagactttggggagcccctgttgagggccctaccctgcctgggaagtggagggtggatggggtggagggtaagttggggggaggggagagggaagggtgagggagaagggattgacatgtgaagcaagcttgtttctaatttgaactaataaaaaaaatttttaaaaagaagtctctgtgtcatgatttggaagctggctggtgggacagagaaagactggctacaaacctgatgtacagaacaggttccaggacagccagggctacacagaggaactctgtctcaaaaaaacaaacaaagaaaaacaaagaatttgagccagcctgagctgcatagccagaccctgtctcaaaaaagaagaaaggaaaaaaagaaaagaaaccagtgagttggctcatcatctgggtaatggcactggtggccaagcctgacaatctgagttggatccacccatgtggtggaaggagaaaacagtctcccacaagatgtcttctgacctccacatgtccgctactacagcaagtgcacacaaaccataaataaatgtgtccccatttgcttctctcttgccgtaataaaacattccagccaaaaacaactttggaaggagagagtgatttagcctatgtgttctcatcacagtctatcactaagcgaagccagggagagagctgaacaggagcagaggcagggacacccaggaaagcttcttattggcttgcttcccacggcttgctcaacccattctcacacaaggggcagggccctcctacagctgttgcatctaggtaatgcctccacatacttgcttacagaacaaagggatctccttaattgaggttctctcttgcgtcaaattgacaaaaataataataataataataataataataataataatcagatattgtggctggtcaagggcaatgagttacctcaatagcagcactaagtccattagagacagggctggctccctgctcacctcttactagcacttgactgatcctttcaaagcagatacacctggatgttttatcataccaagcagcaacacagtgtttgtaacaccgggataatgtcacgatactctagtgtggctctacttctactctaatttacaggtaaatttccccctcccccccccacccaacactccactccccctctcccacacccaccccaccccccaaggctcatgcataaccagctagaactcacagattttaagacttgagtaaaaagaaaccacgtacattcatatccctctaaggatgaatttggagtaacctatcacaaaccaaaataaataattttaaaaatcaaattcaagatatatgttagaaatcataacagaatttggtgtcacatacacactgtggtaattattaaacaggaaagataacacggtatagcccaataattgagtgttataaagtttcccttctgacttaaaaagtggaatgagggctagagacatggctcagaaattagaagcactggctgctcttctagaggtcctgagttcaattcccagcaaccacatggtggctcacaaccatctgtaatgagatctggcgtcctcttctggcatgcagaagtacatgcaggcagaacactgtattcataataaacaaataaatctttaaaaaaaaatagtggacaagtgtggacaagacggctcagtggctaaagttgttgtcgcctgtcctaacaacctaagcttgatccctggagctctcactatagaagtgagaattgattcctgcaagttgtcctctggcctccccgtgtatgccatgaacaaaaattaaacaaacaaacatgatgtttagggggcaaggtttctctgtgtaatagttctaactgtccaggaactcacttagtagaccaggctggctttgaactcacagagatccacctgcatctgcctcttgaatgcttggattaaatttgtgtgccaccacccagcaattttaagggttttttttcctaagattttatttatttattatgtatacaacattctgcttccatgtatatctgcacaccagaagagggcaccagatctcataacggatggttgtgagccacccagtggttgctgggaattgaactcaggacctctgaaagagcagtcagtgctcttaacctctgagccatctctccagtccccaattttaagttttttaataaactatttttaaacagcatgaggggggaatccagatatcataagagaggaagtggtgagacagaaaagcaaaggtcactcaggaaatgaatagcaatacaggtttatataatattgtcaagaagggctagagagatggctcatgattaagggcactgactgctcttccagaggaccctagttcaattcccagcacccacatgacagctcacaactgtctgtaactgcatgatccaacaggctcactcagacatatatgcaggcaaaacaccaataaaattaaattaaattatttttcctgttttatttaaattagaaacaagcttcatttacatgtcaatcacagttccctcaccctcccctcttcccctgcccctcaccaacaccctatcccaccccctttctgctccccagggagggtgaggccttccatggaggatcttcaaagtctgtcataaccatttggagcagggcctagaccctcccccgtgtgtctaggctgagagagtaccctctatgtggagtgggatcccaaagtccatttatgtactaggaataaatactgatgcacttccagaggccccatagattaaccagacctccaaactgacatcctcattcagagggtctggaacagtcctatgctggtttcccagctatcagtctggggtccatgagcaaccccttgttcaggtcagctgtttctgtgagtttctccagcctggtcttgacccctttactcatcactcctccctctctgcaactgggttccagggttcagctcagtgtttagctgtaggtgtctgcttctgcttccatcagctactggatgaaggctctaggatggcatataaggtagtcatcaatctcatcatcagagaaaggcttttatggtagcctctcgactattgcttagattgttagttggagtcaaccttgtagatctttggacatttccctagtgccagaattctctttaaacctatagtggttccctctatgatggtatctcttttcttgctctcctctattcttcccctgactggattttcctgttccctcatgtcttcctctcccctccccttctccccttctctttcttctaactccctctcacctccccacatgttcccaattagctcaggaaatcttgtccctttccccttctctgggggccaaaggctccctctcttagggtcccctcnnnnnnnnnngctgtaggcctggttcagttcattaattgagcaagagatcagggtccccagctgtctcaggacagacccaaagtgcataccattttttttatttgagttacaaacacgattgaattacatgacaatcccatctccaggggccaaggtttgctgtttttaggttcctccttgtttactagtttctctggcactgtgtattgtaggctggtaatcccttactctatgtttaaaatccacatatgagtgagtacatatcatgtttgtctttttgtgattgggttacctcactcagaatgtttcttcgagttccatccatgttcctgaaaatttcaagattccattgttttttgctgctgagtagtactccattgtgtaaatgtaccacattttctctatccactcttcagttgaggggcatctaggttgcttccaggttctggctatgacaaatagtgctgctatgaacatagttgatcagatgtccttgttgtatgagtgtgcatcctttggatatatgcctaagagtggaattgctaggtcttgaggtagactgagttccattttcctgatgaaccgccatactgatttccaaagtgactgtacaagtttgcactcccaccagcagtggaggagtggtcccctttctccacatcctctccagcataatctgtcattggtgggtttgattttagccattctgacaggagtaagatggactctcagagttgttttgatttgcatttccctgatggctaacaatgttgagcactttaagtgtcttccagccattttagattcctctattgagaattctctatttaggtctgcaccccactttttaattcgattagttggtgtttgggggactactgagatagacaattaataaacgtgacctcctgaaactgagaagcttttgtaaggacacagtcagcaagacaaaacagcagcccacagaatgggaaaagatattcaccaaccccacatctgacagaggtctggtttccaaaatatacaaaataaattagttttaagaaaagactgttgggccttacaaatgcctcatgttctctggcagaaagccctgctttacacaatatccttttgtataaaagggacctagtgttcagccatgttgatctcagccatcttcagtttctgttttgtttgtatcctatgatttcaaacacagagctgcatggtcaaagagattgattgcatgtccccaaaattcatattggcatgttgcatgccttacctccaccatggctgtattcatgtaggactagaaactctgtaaaacctagctacacagagagagggacagagaaagagagacttctagaagacattgcatggaaagaccatccagaaacacaaccacatggaagcatgatcttatctgttagactctagattacaaaattactttttgcttcttaaccctcccaggctgtggcattctgttatggtagaggtcaaggagatgttgtttgtcaatgaaacaaagacagcatcatttgcaacacatcccattattttataaatcacagagcactgaaattaaataatgtgccattaaggactgcggacatagttcatttgatggagtgcttgcctatcatgcacaaagttgagttccatccttggcatgacataagctaggcatggtggctcgggcctataatctcagcactcaaggaagtagacacgggaggatcagaaatccagggtcatactcagctacagagtaagttcaagggtagtataggtcacatgagactctcaaaaaagaaagtcactaactagtcagagatctttaaacatggaaaatgtgcatcatacaatagatgaaataaagagctagagagataacttagccattaagtgctgcccttgcagaagacctggatttgattcctaacacccacatgatggctctcaaccatctataacttcagttctagggcatctgcatgcatgtggtgtacagatacacactcgggcaaaacactcatataaataaagtaaatcttttttaaaaaatgactgaaaaagaattgaatgatgaaatgttaaatgtccttggaagtatagtcttcagaccagggaaataggtttaggtggtccctagctaggagcaaagcctctgtagatcaggctggcctcaaactctcagagatccacctgtctctagctcctgagtggtgggattaaaggcatgcacctggctaagaaaaaaagaaatttaaacaaaaccctacttgtaattttatccccaagttgggcctgaaagcgctcatgtgtagtcccaacactttaagtgatctgggttcaaggaaaacctgagctacacagtgagtcccaccctaaactagacaatacagaaagattccattaaaaaagaagagaaggaggaggagaaagaaagaagaaaaatgggaaggaggaggaagaggaggaggagaaggagaaggaggaggagaaggagaagtaggaggaggacgaggagaaagaagaagaagaagaagaggaggaggatgaggaggaggaggaggaggaggaggaggaagccatcgctgccaccaccagtcctgcttggttataggaagtgagtgaaggcagaagcaaaagaatcaggagtctaagcctcagctacagagtgagctcaagacgactagcctgggctttgtagtaagaccctgtctcaaaaacacaaaaaaaaaaagaaaaagagggaagggagggaaggaggaaggaaggaaggaaggaaggaaggaaggaagtcacaaacttgcccacaggacaatctaatggaggcaattcctcaactgaggttccttcttcccaggcaactctaaatttgtatcaagctgacaaaactaaccatgccagtgtccctaaataccccacccccaccccattcagctaagcagtctctccaaagtctttggccccaccgaaaagtatggcagaggactcctctcatgctgttagtgcctccaggtgatggggaaaagctgggcatgttgtctcaggcctttaatcccagcactcaggaagcagagagttagaggccagcctggtctacagagtgagtttcaagacagccagagctatatagtaagaccatgtctcagaaaacaagagaaagagagagagagagagagagagagagagagagagagagagaagagagttgcaagtttgaaaatgtcataatgaaatccattcttctgtgaacttggtttaataaattaataataaaataattttatcttttaaataataaaacagcccttctcaaacattttagaaagataaacaatgtatcagtgttatagggctggagagatggctcagaggttaagagtactggctgctcttccagaggtcctgagttcaattcccagcaaccacatgctgactcacaaccatctgtaatgagatctggtgccttcttctggcctgcaggaacacatgcaggcagaatactgtatatttaagaaacaaataaatctgaaaaaaaacaatgtatcagtgttataaagccaatattagaccctgacacacaaatttaatgaacccctagtcctgtaagtgcataagtggagccagtttggaggaaaccccagtgtggaggccttcatcgcccagcattctgcacttctgtctccctggccggtgctggcttcctctccagactggagggacattttgactcattccacacttggagacactgagaaagaaacaactcttcagagccttactcaaagttagatccataacagctgggtctcaggagagagcacatggaaagaacagacatgaagatgcaacttcaaggccaggaggctcctggctctgccctctaagacgagatcattgcacatcagtcagcaactgcccacacaggtaacaggaaacatcagaacccaaaacatctctctgcttacctagactgaaaatgaaagtcagacattgtggctcacagctaaaattcctatatatgtagcctgggctacataggaagaccttgtatcaacaggaaacaggaagaagtgagggagggagagagagagagagagagagagagagagagagagaataaatatacagtgacataaggatagagatggctcagtggttaagagcattggttgctcttgcagaccacctaggtttggtacccagcatccacacatagcagctaacaactatctataactccagcctgagaggatcagaaaccctcttctggtctcctcacacctgggacacaagcacacatgtaggccaaaatacacacacataaataaaatttttctttcacttaaaaagtaattctttttcatataaaataaattcgggggctggagaaatcgctcatcagtactgttcttgcagaggacccaggttcagttcccaacacccatgtcaggtggcccacggctctctataactctaatgtacagtctgcttaccgtcttgctccagatctgacttcttctgggctcttcaggcatctgtactcatgtacacatacacacataatttaaaaagaaataaataaattcaggaataaactgaattaggattaggatagtgtttccaccaagttgtcaggggccagaactcagctcagccattctagtcagtagctcccatcctcaaggtctgaggtgggtaatgagcctggccattaccattgtatttatctcagaagaaacaggaaaaaggaagctggacattgttggcgcatgccttttatcccagcacttggaggcagaggcaggcggatctctgtaagtttgaggccagcctggtcttcagagtgagtgccaggataggctccnnnnnnnnnnngaaaccgtgtaaaaaaaaaaaaaaaaaaaaaaaaaaaaaaaaaaaaaaaaaaaaaacaggaaaaaggacacatccagagagatgcctatacttttatttacatctcagtggccaaaattagacacatatttatccccaaaagatataaagaatgtcttcttttagttgggtgacaacatgtctagccaatgagctggaagagaatgaaatgtgggcggcactaaactaaactatctcagccacaaatcctcacaccaaaacaccggaatagcagcaaagcaaactcctagtcagctgtgtgagtcatccacctgatgactcactcactcccacccgcagcttgtcagcgcaactgagtttcgaagcgtcatgcaacttacagattgctaaaatagtcacagctctaaatggtatgctcttgaatgcaaagagtctacttagcatttagcacactgtctaagtgtccaaattacatgtttcacaccaaaattactgtctctgtcaagcactaaaggtaaacgcacttagacatcaaccataacttcagaaagattatttctggctcgtagaagtgcagaacattcttcttcgtgttttttcattcttttctgtgggtgagattccttcaatgtgtacacagtggttctgtactcagagaaaacaatgattgcaggaggccagccttctaactgcatcattcacccattagtgaagggagtcagtcagccacaacccacaggaactgaagggagaggtgatgagatctaattgctgtctgtttatcttctgtctgtacttattgggacaaagcttcattctgtggtctgggctggctctacagcaatacttctgccttagactcacaagagctgggattacaggtatacatgagaactctgggcatagaaattgtttgcttgtttgttttccaaggagggtagagttttttttttttaattgttattgtttgggaggttgtagttattgttttgagacaggatatcatgtagtctatgttgacctgaacgtcagccatactccttcctcagctggggggggagggggtgtggaaataacagccagctgctgcaataacatttcaccctcgctctgctccatttccttcaggccacagtctttgggttaaataactctataaaaattacatcatgacctttttcaacatttccaaactatgctttgtagtttacacagaatccaagaataaatgtaacccacaaacagttttaagaatagccatcaagttccgatctgctgctgctgctgcaattctaagtgagtcagaggaagaagctcaacagctgagacagtgttaaggaaaatggaatgcttctcttcccagaaatcctgagaaggaactcccccctgcatatttgagctggtcatcttctggggaattctctgcagctgaaaataagcccagaagaccgggaactgctggtgttagaccctcagaaagctgaggctttcagaatcttagtccaggacggcggccaccccaaacacagaatggaggcgaaagcttgatacaaactgcatgaggctttattgtagttttacgagctaaccccatgttagctcgggtctttcacccacccgccatggcagatggctagaaaaacacggctccttgggtctcccaaaagatcttatagggcagcgtaaggggagtgtctaggggtacgcacaggctcacgattggtgtgcttccaggcttggagggcttgccctgtgttgattggtcaactggttgttatggcccataggccctcccagggcggttgctatgctctctacgtcattgctgtgtgcttgtccgtaaagcacacccagagccataaagcatagcgccaccagctaacttctgattggttccttgtcacgagacaggcatctgactttctagtgtctaggtcaaggtcatagaagcacatgttcgaccattatggctgccaaaagggaagccggttccttcactggcaccctgggtgctgatctctgctgcctccagcaccacccagccgtcccctggctcacccagggctcccagatggaggactggttcaagagaaatatcatgaggccctggcttccttttccagaggggatgtgttaatcaccccaccacaccacactgctttttctaccaaaaggatgtttactgaaaatcatttattcttgtttttttgtttgtttgtttttttggtttttttttccttttgctgctcctaacctatagccaaaaggctgacaaccaatttaaacataccagtcttactgaggaagtactcaaagacacatgtataaaaagtatagccagggggctggagaagtggctcaggggttaagagcacttgactgttcttccagaggttctgagttcaattcccagcaaccacatggtggctcacaaccatctgtaatatgatctggtgcccttttctggcatgcactgtatacatgataaataaatctttaaaataaaaaagtatagccaggtggggtgatgcacacctttaatgtcagcactcaagaggcagaggcaggtggatctctgtgaatacaaggccagcctggtctacagagtgagttccaggatagtaagggatgttacacagagaagccctgtcttaggggagaaagaaaagtaataataggggctggaaagatagcccagtggttaaaagcacacactgttcctctagaggacccaaatttggtggccagcacccacaatgtgtacctcacaactgcccataactccagctccacgggatccaggacctctgacctccatgagcacttgtattcatagttaaaataaatgactaaatctttaaaataaaataatagtaaattcacacacaaatcctggcttggttttgtttcctgcagccttacagataaaaatatgcttcgatgagacagaaggcacggttactttttgcagaaaaaataaagacatcactaataatcaagtatgcactaggctctaatccaaacccagccttcaagtatgtatgtgccatccacttgcaacttttcaccttgcatacctactgatgcaaggtgaaactgataccctacaaacattaatcactagccatccccattccccttccctaagctctggaaactaccattctagtccactctgcctctgcccaccctaggaagctctttattgagtgggaccatgtacagtctgtactttccggatggttaatttccaagattcatccatggtgtaacatatgttggaattcctttcatctttagtaaaattccttagtatgtatacatcacagttgtttatccattcacccattgatctaactgcatgtagtttccttacatttatttggtgtgtgaatgcctgtaggaaagagaattttcagtagtcctgtctttcctctgtgtggatcttagtgtgaaactgaggtccccaaacttgccatgggtatctttacagctgagctgtctctccagccctgtacatattttcttttaatttaaaataaatgtgtatcgctgggtatggtgacacatacccttaatcctaacactgagaagacagagacaagcaaatatctgtgggttcaaggccagcctggcttacatattttgtgggatatgctgtagtggtctcttgccagtagagtctatgtgaggtcagattaacatggcattgtaaagggacagtcatttaactgtgaacttgtgaggagcaccctataacagacacacttccctttgtgtcttttctattctggaattgtttaatcagttcataactgtgtggtgagagctatcatttcctttaatttttcaactgctctttgcatcttccatgttctaggcagtgtactcatgaaagaacaagcttgggttatttcccatctcagagggaacaaagccacagattcagctgcaccgcagggcctctgtgtgacagaggaatgagggaagtgctagttaaacccattaaaggaagggtgcctgtacaagtgggtcaagggacaccctccccaggtgatcacatttaatccatgcactgaaaatcctagcactctggaggcagaggtaggagcatctcagagtttaaggccagcctgatctacagagagtgttccaggacagccagggctatacagagaaatcctgtctcaaaaacaaaacaacaacaaagaaatattaaaaagttcaaaagtcatcctcagatacatattgaatttgaggccagcctgggttatatacaaccctgtctccatcaagctagcagtaccatctgcactttgagggtgggaggatacagggtcaccatacgtagccctggctgtcctggaactctctatgtagaccaggctggcctcaaactcacagagatccacctgtctctgcctccccagtactgggattaaaggtgtgcaccactatgtccagcaccatctgcattctataaaggctaaccctctctaaaccaactgtgtgcagggtggattagaatgagaacagaagaaaaagacagggaagaatgggaagatccctacagttcagtgagtctttgtcctgaggaatggcttccttctgtccacagaaacgatgacccaaaatctggttgaattcagttaagaaaaacatctacatttctgcactttggcacattcaagctagcaggtgtgtgtgtgtgagagagagagagagagagagagagagacagacagacagacagacagacagacagacagacagagacagaaactgcttcggttttggggagacagtttcactatgtagtcctcaagctctttattctttcacctacacacacacacacacacacacacacacacacacacacaccttaagacactgtttttgaaatgtctgccttactgtttttgaaaggtctgccccctgacctgttctagtaatttagttctgtcatcctaaagaactactaatctgtttcctgtctctatggatttgcagatttgagacatttcacataaatagaattgtgtaatatgtgactttcgtgtctaacttcttccacctagcataatgttttcaaggctcattcatattataacgcatatcagtttttgtggccagcttaataatgtcctgttgtaaggacaaagcccattttccattcactaactgacagacatttgaactctttctatttttgagctattatgaataacacttctgtgaatgtccagtatacatttttttatgtggatatgttttgtttctagtgaatagaattcagcaattcatatatatacaaccaaaggagcttccaccctaagttaactcggcttctcttgtggctttgaatgccaaagagaaagcagctgatgtgccaaagccatcttcccaagaaaacaggtttggtcacagagaaagcagcagcactccgcagtgagggtgacctcatgccgcccacaattgcacacaaaaggaagcaaatgtcagtccaccctccctcctgtctctaaggaagggaattggacccaaaccctcttcccctgtgaaggagacaaagttttgctttaaggccgagtttcaagtagcccatgctataatgcaggactccaaataaagccaagggtgaccttgaacttctgatctccctgtttgccttgccaagtgctgagctttaaccccaggtttttgtgcatgctaagcaaggactttaacaactgagccacatcctcagctccccaaaagacaaggacttttcaaggaggaaactcagaatctcagaactggcaactcagagtttgacaagtgtatgtagagttcgaactgtgtacagagtggttctgtgtacagagcttatgagaaaacactgagcaacggcaatcagaaaggaaggactcaccttccagccaaaggtcaatatgacactttcgtaaagaaagcaaacaaaacttaatgcagccagtgctgaagtaagaaagagttatgaataacctggcccatgtatctgcagatcccaggacacctcctcctccagcagccaatgtagtaaggccaaagtcacatacagtactaaaagctccaggctggacagaaccaactgacctctggtcgatagtaaatgctgtcaatgtacttgacagtgcagggagtgagatttatatctcaatattgttctagcagtatttcaccagctctgccagccctgtgtgattagaaatagatcctactaggtgtcacagctcactcccagaatccttagatgtatgggaaatggggaaatggagtgtcgagggagcagacgtacctagagaggggtgttgtgaagcttgagctaggagagagactaatgttacagtgttatagaacaaaaaactctgaggttcacaagacaatggcctgtctcccttaatggaagcttgtaacctacaaaaaagcctaagcagcaacaaggaccttaacattaaaagctgaccaacaatattctggagaaatcattcaaagtactattttaggactacgatgtggatcaggagagtgcttgcttgcctagcatgatcaaagccctgggtccattcccagcataaataaaccagggtggtggtgcatacatgtaaacccagctctcgagaggtagaagcaggggatcagaagtccaaggtcaccctcacctatggagaagtctgaggccaatcttggcttcttaaggccctgtctcaaaaaagaaaaaggaagaaaaagcaaagaagaaagaagggcagggcaggagggaagggagggagggagggaaatgctatttttaaaaaagtatttcttaggaatggacgcagatgtggagtttcatttccgtgtatgaaacaaatgaaatgttctgtctttaccttggagaaggtctgaggcaataactgtgctgaccccagaccctggtcactttcaagagtgtcagtctcatccacagctgactgcctgagtggctttgggctaccacttgaggagaatttcaaattctctgttgctttgttttgatctttcctcctttggagaaaactgaacctagggccttgtacaagctaagcaacactgcaacacagagcttcacttgaagcccaagccagtcaacattggttgtctggtttctgatatgctcagcagaagacctggacatcaggcatctatctatagagcaggtatctagatacggctctagtgccttcatagaaacttggagatttctgtttagtcccaagtctgctcagctgtggtcctcagaccaagcaaccctcaggcaccctcagccacagggatagtaagttacatccctgctctgtagttccctgacatgggcatcattatacttgtggataggctccataccacctcttcattctgagccctataatgtgaccatctagatatctccagtaggccctttctttagccaggtgatgtccctgtctcctgtccagtttcactttacctcttggctagctgcccggactttggctgaggttactgtagtgcctctccaggcactagaaatccaaaggtacagaagtccactgggcaactggcctctgaccttgtacttctgggtctcagttacatcacttgaatttctttgccttccatcctttctccagcccaggaccaagcattctgaagagaggggaagtgttggggctctccaggggaaccaaccaaaaggagacataggagaatctccaaagagaattgctaggagacatcagctctcacaattgtggagagtaagacatcgcacagtctgctgcctccaagctggaggcccaggacgtcagctctgtagcttcaatccaaacttagggaggagagtgaaaaggaggagaagggagttggggggggagaaagtaatgccttacaggggcatctagaatgcaaatacaaattcccttttcaaccgtcctcagaactcacagaagtgaggctcaccacatcctgtatcaggagagagcatggtttccagctcacagtggattctaccagacaattttctgcatacatgaacatgcagaagtggtttttgtttggttttggttttggtttttttgagacagggtttctctgtgtaacgatggctgtcctggaactcactctgtagaacaggctggcctccaagtcagagatccccctgcttctggcccactccctgtcccaccttccacacccctaccccaccccacccccacacctgctggggcaaaggcatgtgccaccatggcccagctgtataagtgttttgaatgctgtttgttctattttattttatttattgggtatgtgtatgtggatatgagagtgccagggagcaggtatggcagtcaaaggacaacttgtgaaagtcagttctctccttcctctacatgggatctgagaattgaactcaggtcatcaagctccagagcaagtgcctttccttgctgagccatctcaccagtccctgttttgtatgttttatctcacatattagattacataaaacactgttctttaagttggcttgatgttaaatcagaagcccgtacaccggggctccaggcacagtcctgttctcttcagcaatcacagtgttaatcactgttccattgattcaactttgtttcaggcttctttctgtctttgcaagcatgctgcaatgagtagtgttggggctctccaggggaaccaaccaaaaggagacataggagaatctccaaagagaattgctaggagacatcagctctcacaattgtggagagtaagacatcgcacagtctgctgcctccaagctggaggcccaggacgtcagctctgtagcttcaatccaaacttagggaggagagtgaaaaggaggagaagggagttggggtttctctgtgtaacgagaaattgaatggatagatgtacattctggtgggtcattctatttgccattttttaaaagacagagagtggagggggggtgttgagtcaaggtctcactatacagtcataatcccttggctagcccatcacttccagcttgctttctgaaactttctgaaaccaagacactgcctaaaagattgcaaccatgaacactcctaacactgaaggcaacaataggttttcttctttttcatttgggggaaattgggaatgaaacagcatattgctgcatttatttttcatttccctgttgtgagggaatctccagggtcttacctttttattcataagcagggagaatccagacccaggcaacctcaggcaccaaacgcatggtgtcaaatgtattcatagcaactggatttgtatgtggaaatatgggattctctatgcatcttccatgcttattatcatgtgtaagccaccgatgaagatagcattatataatgatgagaactgggagccttgagttagtgtctcaccatgtaagtccagaaggtcatctaaattacctttgcttgcttgctagtgacgtaagagttgttttgaaatacccccagtgacctttcaatctgagcttagttcttgctcttacacttcagttccacatcagtttttttcttttttgctgtgtcaaatagtattaaccagtgcacttccatgtaaagtgatgaagtttacgctgttcactaaaaactcatcctagtcgtttgtattgacacgtaatttttatttcacatttaattttttcaggcacaattacttggtccactttcaactagcataattcaaaaaagaaaggtttagtaaagattttttagtaaactaactggaatataaatgaatagtaatttttaaatggtattggaaaatatgaaaaagaaaattaccttttttcttaagtagtatctacccatgtggtgggcttgtctgcactatctttctttctgtgtgagccttacaggtgtgtgcaccataccatctacaaaaattacattctttaaatacattttataaactttattatataaaaaagccctgcaaaaaaaaaagaaagaaagaaaagaaaaaagaaaagggatgggcattggtggagcatgcctttaatcccagcactcaggaggcagaggcaagcagatctctctgagttcgaagccagcctggtctccagagagagtgccaggacaggctccaaagctacacagagaaaccctgtctcggaagaaaaaaaaaagccctgcaataaaaaaaagttataccactgagcagtggcgcacacctttattcccagcacttgggaggcagaggcaggtggatctctgtgagttcgagaccaacctgatctataagaactaggtccaggacagcctccaaagccacagagaaaccctgtcctgtctagaaaaaaaaaaacaaaaaaaaaaagaaggaaggaaagaaggaaagaaagaaaaagaaaagaagaaaagagaaaagagaaaattcagataagtgaatgagttgttcaaagatttcaaagaaattatactcaaagactataagaataattttttttttccctttgtgttcgtgttttttgagacatagtctcactatgtagctggcctcaaactcacagagatccacttgcctctaccttctgagcactgggattaaaagtttgtgccaccaaggcccagccaagaatagatttcttagcaaagtgtggtggtatgaaaatgtaatcacggcatttaggacgatgaaacaggaggatggtgagtttgagactagtttgggctattgtaataagacttgattttttgttgttgttgagttttttgggttttttttttcaatattgggtgttttgttttgttttgttttttttctctgtgtagtcctggctgtcctggaactcactctgtagactaagctgacttcgaactcaagagaccacatgcctctgcctcacaagtactgagattaaaggcatgtgccacaaccaccctgttgtctaaaaatatttttttaatttaaattatatagatattacgtatttgttgtaagaatttttaatttgaaaaaatttcattgtttgtgtatggatgtatgtgtctgtgcaccgaaaagggcatcacccctgaaagtggagttacaggtggctgtgagccgttatgtgggcgctggacatccaccctgggtcctcttgcaagagcagccagtgctctaaccactggcccatctttctagcccctatttgagatttttaagcttgggggaataagagcctatgttgttccaagccccactatctagtaagtaaggcagaaagtgttgcagaagtggaaacacaacaacgctcctcccttagctgcctaacagggcagaggctctagccttgctgctgatgcccatgtttccaagggcacagtattagcctgagaagcctgactcagcagtatgctgatgccatacatcagttaccacacaaccttcaatgaagtaagccagtccttcccagtttccctagagactcggcagctatttctgaccaccaaacactgttgcttatcacagcacagcttcacaattgatcagttagcagtcaagcccagggtttttaatgaaaaagtaacctaaatgcagaactagtggataagtcattgcatctattactgatagacctccatattgaatggggaagaataattctttctccagcaaacactaactgcaaacaatatcctaacgtgtaacttagctttagtggctttagtgttagggcttttgcttggttttgtatcttttttgttttaaacagggtctcatgtagcccacaatagcctcaagttcattaggtagctgaaacttctgattctcctgcttccacctctgagtgctgggatgacaggtgtgtcctaccatgccccagtttatgcagtgttgggatggaatccagtgcctactgcataagtgggaagctctacaactgagctacaaaatcccaaatccagggttttcatcgttagctggttggtttggttagtggcactgaggattgaaccaggcctcacacatgctagcaaagtactctaccactgcacttcatctccagataatgaattttttactttgaaacagaatcttactgtgttgcccaggctagcactggtctcattttgtagcctgtgaaggccttgaatttatactcttcctgcctcagcctcctgagtagctgggattacctatctcacatttatgccagacctagattttgtttttaaaagattcctttcaactttcatattctcccaggtcaatgactatagccagcaaatcataaaactcctttctaggattcaaaaacccaatcagattttggtttaaaagccaaaatctggagtagcagcccattcttgtaatcccaccattccagaagcagaggcaggagaatcaagagttaaagtacagccaagaatacacgccaagtgtgagtccaacctggcttacatgagacctgtctcaaagcaaaaaagcaaaagccaaactatcaatatggaactcttgcacagtagattaaatcagtaatcagtgtacacaggaagctgagacaggggaatcacaagtctgaagtcaatctgggctatcaagcaagtacctttctcaaaaaaatcaaattacaaagtttagtagaagaagcttgctgatcactgagcatagtggcaggtagcatctacctgtgatcccagcactcaggaagggggctgaggcagcaatgtcaagtgcttaaagccgtcctggccacaaagtcagaatgtgtcagattaaatgacaatggaccatagtgcagatccagtttgtgcctggattggcctgtttgtggacagcacaacctacacagcctcaaatggcagtctacaggtggatttctacttcctggtacaatggagatggcagtatactccatgttacaccaattgaccaaaacaccatacaaggaaaaggagtgaaccaacctgccatctctaaaccatatttgacactcctgatatttctagggaaatcagacatcatcccaaaagggaaagttgaaactggagatttcctgatccccacagtttgtcctaagtgagaccacttgaaaggtaaatgaaaggaccacccaatgggctgttgagattttggtcagcagagccttgtgcacactcatctaggtgcatttagcaaataggagctggaatccgacaccctggggaagtttgggctgtgtgtcgccagctttagggaaagcactctctctgggggcatgttatctatagtgctcacagcaactcaggcagccagcgtgaacacttcctgtgtagaaaggtcagccaggagtgctggttagagctgcacaagatcttatcgccgccgttcatggttatttccccatcatccctccctagaggtacagcttcactagagcctggactgtgtgaggaatgtaattcgcaagatttatggaaaacgatttttcaggaatgtgctctcaatttttattgggcaaattcctctttccctggtaagtgccggagcatatgggacaggtaaatgtcttaatggacagcataaaagtaacattttttttcctgcccaagtggatgactcacacagagggcttctaatcccatttttcactggagcaaatgttcagtgcaaaggaaagagggggaactcccacccttcaacctggctgtctgcactgctcagtaatggctggatcatttcgcagattcaagccactgcttctggcacatccatccttggggaaacaaacttttattgaatttctctcctccaggtgttagcctccttcctgtctcttatatacatcggacttgtgcctttctaagatctaatacaataagatgaaaatagccaaaggcggtctctcccggttccgaaaggaaagattaatggcagaaacaaacagtaatgaaaagtcacaggagagaacagtgcaggtaaacatcgcacaaacgaacacgcatgggatcacttgctcctcagaattggaatgattacatccattattaattttggcttctatgacacaacagagctaaataaccaccttggaattggtcagtgatcagcttgaagttagaatgaaggcaatgcaatccattcaaccatatccacttactaagcagctacggtgttttactcaaaccatgcttgcctccatcggacagggtgttatgtagctcaggctgacctcaaactcaccatgtcactgaaaataaccttgaactcctgatcctctgtctctacctcccaagttcatatgccagcactcccagccactcacccattcttaaacatctttgggtaaacagtatcatctcttgacacttagcgatgcataagagtggaggaaatggtagattttgccctcctttgagtgttcatcctgctgctgactaaatgaatgacagcatgtgttcaatagaataattcagcctcacatgatagacaaaatgaacactactctaaggcccatgctgagcatcaacaggaaagactggacattttgtgagcagctataaagttaaaataacacttccctctgtccttcccttcccccaccccacctctctctctctctctctctctctctctctctctctcttttctaaacagggtttttctgtatagcctttgctgtccaggaacttgttttgcagagcaggctgacctcaaattcacagagatccacctgcctctgcctctcatttgagacagggtctcatgtagcttaggctagcctcaaacttagtatacagcaaaggatgactttgagctcttgatcctgctgccaccatctcccaagtgctctggttgcaggcatgtgccacatttagtttcatgcaatgctagggatagaacccaagtcatcaagtacactgtgccagtattctgccagcagagctacacccacaacccaatgtctgtcttcaccagagaaacaataagctgcccttaggaccagctagatggctcagcagaaaagagcatttactgctaagcctaaaaacttgtgctcaatcccaggatccgctggaaggagaaaactaactaaccacccactgcaactagttgctctctgactgccacataagcactgtgacatgcacgcgcgcgcgcacacacacacacacaaacacacacacacacacacacacacactaattaaaaagaaatttaacttctagctgctcataatgatggcgtgatggcaatcaccagcaaccgtagtactctgaaggctgaggctcaaaaatcccaaatccaaggcctgcctgggctacacagtgaattcaaagtcagtctacagtaagactctgcctcaaacaaacaaacaaaacaaaacaagagagctgggggggaggggcgtggtggtgcacatctttgatcccatcacttgggaggcagaaatagatctctatgagttcaaggccaacctgttccacgtagtgagctccagaacagccaaggctacctagtgagatcctattttaaaaaacaagaggggtgctcgcttcagcagcacatatactaaaatcggaacgatacagagaagattagcatggcccctgctcaaagatgacaaatgcaaattcatgaagcattccatgttttttttaaagattttatttatttattatgtatacaacattctgcttccatgtatatctgcacaccagaagagggcaccagatctcataacggatagttgtgagccaccatgtggttgctgggaagtgaactcaggacctctgagttaagcacctcagtgctcttaacctctgagccatctctccagcccgcattccatatttttaaggcctcaccctcctgaggagcagaaaggggatgggataggagtagggggcagggaaggaggggagggagagggaactggggttgacatgtaaaacaagcttgtttctaatttaaattttaaaaaaagaaataaatgttagcaaggaaatgggaaaaaaagaggagccaggtagtggtatctcactggagaggcagagacaggcagatctccatgaatctgaggacaacttggactattacacagagaaaccctgtctcaaaaaacaaaacaaacaaaaaaaaaaaaacaacaacaacaacaacaacaaaagagggttgggaacatagctcagttgttgagaccttgcccagcatgaatgtggtcctaaattaagtacccagtggtggcacacatctaaatcctagcacttgaggagtgaaggccagacaatgaggagttcaaagccaacctcaacctcagcttcatagtgggctcaatgctagcctaggctacataggaccaggtctcaaaaaaaaaaaaaaaaaaaatgcccacattataataacccaaaagtaaaattggaatcagggtgctaacatccttcaactctacctcagctacggctgtgtgtctttcaaaagcaattcacaatatcccatctcctcaaggaagggcagtacaagcctgctgtgtacaaagacaaggccctctgcttcaccaaggaggcctcatctcgtgcctgtgcctgttcttgtaactgtgtggagctgagaccttaaaggaccttcaccctccttcagggtgtgaaaccctgtgacaaatctcactccaacagttctcatcagtccctgttcctaacactcaagaacagaatattggctgagtgtgatggtacatacatccctttagttccaggaggaagatctctatgagttcaagactagcctggtcaacacaccaagttccaggacagctaaggatgcatagagagactatatctctaaaaaacacaaagaacaaacaaaacaagaatggaatctttagaattggggagaaaaaaaataaacaaaaaccactcttttgtttgtttgttttggttttcaggacagtttacctgtgtagctttggctgtcctggaattcacttagagatatatcagcctactgtgagagccaaagttacatttttaagttttaattactatgcctaagacatccatgaaacaaaaatgcctctgatctgcaagccccttgcccaagcatagatagttcctgaaatacgggaggctattgtttatgggggataacaaccacaggtatcactcccttaaacaagtttgtttggcttaactgtaccagatgtgcttgatcacataggggtggcagtaggcaggaaatatgtcaagatggatactcgccccttgattgggcatgatgggaaatgcaatgaattatgggttttccttcttaaacccttgccatacttgattctgggccatttcccaggaacctgggtatgaacaaggccatctacctgggcaatatttaaataaaacttgcttcaaatttgactttaaactatgacagtagtcttattctcaactggtggaattagcattgcctctgcctcctgagtgctgaggttaaaggtgagtaccaccacagcccggcaaaatcatctttttcttgatcctgatattatttgatcttgaagcaaagacttagatcaagtttatgctttggcccctttcaccttgggatgggttacttgccagaagccttcctgaggactgttgcattttgaatcttgaatgtatccccagagaaccatgttgtaaagtcttggtctccagcctttggggttataggaagtggtgagacctttggaaggtaggacttagtggaagtttaagtcactgtgggagagttcctaggcaagtgctctaccactgagctacactcccaaccttatttttaagagtaattgttaagtaagacccaggtcccttcatatctctctacaattcctggttgtcatgagattaaatgcctccacacacacacacacacacacacacacacacacacacacacacctgccactttgtgcccaaagcaacaaggctcaggagagcacctgcctagcatgcatgaggccttaagtatgattcctagggagagagggggtggggtgggttctggcatagctatgagcagtctctgaagactctacctgagaatatttcaacccttgaatgtgctagcagtcatcaccaatgtacccacgtgattcccagaacagaaagcacagatggaatgtatcagtatagaatccatcaaccagtttgtatattggttctgacaaccatcaaatttaagtttccctgtccatttacttgcacaatctctatcacttagcaatgttatgaaaattaatccaaagtcggtcagccagcacaatattgcagctgtgacagatgttcagtagatatgaactcccttcttatcatttttttcacctgcacatagatggcagacacatgcaaacacataagtaaaaataaattttctttcaaaagaaaagctatgctgcatccttaaagctatgaattattaaaccccaagccagcagtgagataactgagttggtgggtagcaagactttagaggcccaaaacacaacacaaactcgtatgacttggtcttggctgcccaccagaactagatgatgagacctgtgggtgcagttcagtgaggagggtaccagcctagcttaccagatgcccctgcttcaaatctaggatggcctagaatgaaacagtagaggcatataggtcttgaatgtaatccctaccactcaacagatggaagctgaaggatgaggacttcatcttcctgcctggccttggctggctaaagacccagctgtgagggttacattagatcctgcctcagaacaacagaagaaaaattagatcctagatgataagaccctattgttgacaggacacaccttactgtgctggaagcctcaaatttataatgccaaaaaacactacacagacttctggggaagaaagtgtatcagtggttttactcagttgtaagctttacaagctacaatactgtcatagcaggcaggatatatctacatactcaatagtagcatgattgttctggaatgaccaggctgctatagaacgttctatgaggttaggagggacttgcaaacaaacaaacaaaaaaagagcattaaaggagaagaggagtcaggagtcattgggagatgcagaggaaggaggagatgaatttgccatagtaagaaaaggtaccaagccatgtggcagagcatagataagaaatacgggttaatttaagttataagaactagttagtaacaagcctaagctagcagctgaacatttataattaataataagtctttgtgtggttatcggggagccagaggtcccaatgaaaacctgcacctacaccaacctctctccacagtactgtaaatccactcaaaagttcatggtgagggagctaatgggacctgggagaggggacttaattctggtatgtagctaaacagacacagtgttagacccacctcccaaatacatgtgtttatacccatagacaacactctcaactatagtcagagaagccttctctcttctctctctctctctctctctctctctctctctctctctaggaaactacagtgaaggcagaaatgcacaactgctgtgcatggatgagtgctcaaccataaacaaaacatttatatcatcccttccaagatttagggaacactgtgtaagaaggggatggaatgatagtaagaaccatcagacaggaaaaagaactaaaaaaggccatcttcttgacaatatacagccaatgcaaccatgagccctcaacaactacgggtgactacactgggtctgcactggaacaggctcatcaatagccaatcaggatgagagagaaacctagggagccccattcctcactgatgaactgtttcctacagatagagttagggaaagagggagtcattacctccaggtttgtacccactggtgagcccaccaggttccaaagcatacattcagtggtcacagagatggcagtgactaaaataaatagatcacaccaatagtcaccaatctaggagagacccaggtgaaagggataggagagtggtaggggttattcaatcacactgtgaccccagagtttgcatttgcattaattaactaaaattaaccttgggtcaggaggctgcattagcaactagttgacaggaagtaatcatagagcctcaaagggcatccaggaaagatggagacacaggaagtagtagggtggggtttgaagtggcacagctttttctggtttggcaaagcagaagcatgggtcttctgtggatgccagcaaggaggaaggcttagctagttgaaacctctctgagcttgaaggtttcaccccagccgctgaatctccagtcttattcataactagaatgatagaggtttagttaaagctacctttagcagctacaggtccagtgcctgcaggatcagaatacttgccaggctgcagcctgagtggccaggctgctgtttaagaagcaggctggtaactggagctgcaattcctggatgagatagcagtagattaaggtgcagtcactgtgctgaagttaaagtaagataagagagggtagcagagtaatccaaatgtataagcatgtatgaaactgtcaaacaacttaaattttttaaaaaggaatagagagagggccatcagtagtggtgggataatatacccaaagaatattataaaattgcatgcaaatgaccttatataaccatgtattttttttttttttttggcctggccatggtggcacacgcctttaatcccagcactctggaggaggggcaggaggatctctatgagttcaaggccagcctggtctacagagagagttccaggacaggctccaaagcctgtcttgaaaaataaaaaaaaagagagagagagagagagagagagagaaaggaaggaaggaaggaggaagcaaggaaggaaggaagaaagaaagtgtttaaaatatgtattttgctataaataccagctaaaaaattctcaatgctcctagatattttgttttgttttgggcaaaggggatgggggagtaagctttttgacttgtgtgtgtgtgtgtgcgcgtgcgtgtgtgtgtgtgtgtgtgtgtacagcacatttgcaggtgtacatgtgcaacagtatatctgcagaaacaaaagggcaaccttgtagactcagttctctctttccatgatgcactcccaagatgtcaggcttacatgtcatgcttttaccctctgagccaattaacacacccactggtagaatttattttttgtatgtgtggctgagtgtgtcctgtcacacatgtggaggtcagaagataatggtgtgggttccagggatggaattgccatctggatgaccttgccctgggaatttattattattatattattaaatccacaaaattgaggctggagacacatctcagtggtgaagagctcttactgatcttgcagaggacctggatttggtgcccagtacccacttggtggctcacacacatctgtaacgccagttccaggggatctgatcctgtcttctgacctccataggcaccaagcatgcacatgcaggcagaacactcatacacacaaaataaaaaacaataaatctttttttttcctccgagacggggtttctttgtgtgactttggctgtcttggaacttgatctgtagaccaggctagccttgaacttacagaaatctacctgtgaagggaccagctccccatttcagcagccataacagccgaacacgtacttgcctgaccttgtcttggtcactaggaggtcagatgcctgcctcgtggcaaggaaccaatcagaagttagctggtggtactatgctttacagctctgggtgagctttacggacaagtgcacagcaatgacacacagagcatagcaaccaccctgggagggcctatgggccataacaaccagttgaccaatcaacacagggcaagtcctccaagcctggaggcacaccaatcctgagcctgtgcgtacccctagacactcccctataagatctctatgcagacacttgacagggtctttcctagccatccaccatggtgggtggatgaaagacccgagctaacatggggttaggtcgttaaacaactacaataaagcctcatgcagtttcacctctgcatggtgattggagtggccgaggtcctgggctgagatcctgggggcctgagcctccggggatctttcacctgcctctgcctcccagtgctgggattaaaggcatttgccaccactgctgggctcaaaataaatctgaaaaaaaaaaaaaaaaaaaatgagccaggcagtggtggcacacgtctttagtctcagtactccggaggcagaggcaggcagatatctgtgagttggagaccagcctgatctacaagagctagttccaagacagcctctaaagccacagagaaaccctgtctcagaaatgtattcatttcttctgatattaaagagggacactcttttccctcagtttgaaaatgcttccagtttaataagcctcttagttaaagggatgaaaaactgatatttatttcttccttgctacctgcaaagactgtagcagagatgggtggctaagtacatgggctgggatactccaccactgaactagatggtgatcttgggcagctaacagaatcaggtttgttgttgctgtttgttgaggattttcattagttttagcttgtgtgtgtgtgtgtatgtgtgtgtgcccacacacataagtatctggaggctagaggtgtgtctgatcccctggagtgggagaagtgcttggaagtagctgtgagctacttgctgtgggtgctgggaactgaactctacaagagcagcaagcactctccagtgctgggtcatttctccagccatgtgaaacttagcaggtttcccaccagacatttttctctacaacctcctgttattttctaagaaactgaaactggccctaattaaagaaataaacatgactgggagtggtggcacatgccttgaatctcagctctcaaaaggcagaggcaggtgaatctctgtgagttcgaggccagcctggtctatagagcaagttccaggacatccagggctatacaaagaaatcatgccataacagcctaacacatgcttgcctgaccttgccttggtcactaggaggtcagatgcctgcctcgtggcaaggcaccaatcagaagttagctgatggcgctatgctttatggctctgggtgtgctttacggacaagtgcacagcaatgacttgaagagcatagcaactaccctgggagggcctatgggccataacaaccagttgaccaatcaacacagggcaagtcctccaagcctggaggcacaccaatcctgagcctgtgcgtacccctagacactccccttatgctgccctataagatctctatcccgtggcttctcggcgtcttttcccagccatctgccatggtgggtggatgaaagacccgttagctcattaaacaactgcaataaaagagtcattgcttttgcatcgaaatgggcctcttggtgatttgggaattcagaatttgggcacaacaggaggaggaggaggaagaagaagaggaagaggaggaggaggaagaagaaaagaaaagaagaagaagaagaagaggaggaggaggaggaggaggaagaagaagaagaagaaagaagaagaaaaggagaaggaattgtgagattgagatagttatcagatgtgctctaaggcatggttgatttcaacttgcttctgtgtttgtctaaatctaagccacacaatgaattctagagctccctttcatttcgattgaattcctgccagttcctgctaactgaaccctgcagccaccaggccacagaaagacagcctttcatcctagaagttgttttgctgcttgagaaatacaagtgggaaagaattggtgtttgctgaatgccaagacaatgtgttaagcactgtacttttggatttacttttcttggcatggtaggttctctttgacaggttttccaggtgaaggaataaaagttcaggcccattgtgtcagtcctccaaagcgaagagagccagtgtcagctctgccactctgtgctccataagaatctggcatctcctcatgacatcttttcagccatcctaattaaatactagctaaagcttaggttctcttgtctggcaagctcttcatgtcttggggaacacaaaagaaaacttttattttaatgttttttgagttttcaagacagggtttttctgtggcgctttggagcctgtcccagaactcactctgtagacaggctggcctcaaactcacagagatctgcctgcctctgcctcctgagtgctgggattaaaggtgtgtgccaccactatctggcttaatttctttttagtttaatgtacattagtgatttgtctgcatttatatctgggcaagggtgttgggtcccctgaaactggagtttacagacagctgtgagctgccatgtgagtgctaggaattgaacttgagtcctctggtagtcagtgctgaaaggttcaggcagatacctaggcagcttaaagggccctgtgttgcatggccatatcatgactacatcactcattacagggctgtgtaggactcagtgcacatgcgtgagctcccccttttaaacccaagcattatttgcctttctctctctctctttccagcagccgacctctctcctctctcccctctccccccccctctctctctgttcttccatttctctcccctcttgctcttccgccctgtaataaactggttaatgtgctcttgtaagaccctcgggaagctgaggcttccagaatcttagcccaggaccgcagccaccccaaacacagaacggaggcgaaagcttgatgcaaattgcatgaggctttattgtaatttaacgagctaaccccatgttagctcgggcctttgatccacccaccatggtggatggctagcaaagacagtttgaagccgctgcgtacagatctttatagggcagcataaggggagtgtctaggggtacacacaggctcaggattggtgtgcctccaggcttggagggcttgccctgtgttgattggtcaactggttgttatggcccataggccctcccagggtggttgctatgctcccagggtggttgtgtgtcatttctgtgtgcttgtccgtaaagcacacccagggtcgtaaagcatagcgccaccagctaacttctgattggttccttgtcacgagacaggcatctgactttctggtttctaggacaaggtcatagaagcacgtgttcggccattatggctgccaaaagggaagctggtcccttcactctctatatttcacgttccatgtccatctctcgaatttctaatttaagcaaaagaataacaaatgctcttaaccactgagccatctctccagaccctcacaaaagaaaatttaattgtagctctcctggattctcccatgggaaatcatgccaagattgacttaggtcccagtgctgatttaaccacttacactggccaggggtggtggtgcacacctttgatcccagcagagaaaggtggatctctgtgaattcaaaaccagcctgttttacatagtgaattccaagacatcgagagcaacataatgagacattatcctgtcatcctgtcgagcagagaacaattccattagagaatttctctggggtccaaacctctggttccagtaaccccgggagctctggtctgcattgtattgcagatgctagctgatttgctgttgaatagcatagcctcagtggagaatgcctcctagtttgcatctctatgggcctaagcattgaggaggcctgcacctgggctgaagactctttgtgcctagaaactgtttaggtggacgcttgaattaatagaatcacttgatatcagctatatacatcataatagatgctttctggtactgcccctgcccttggagaactatttaagtggactcttcaataaactctggcttctcagtatcagctaggagccctcctgagatgataatggtgtttcctgtctcattattagtgctgttggttagttaaattcccccactcagaatcggaccagggtctgtacagctggctccattcacagtcctgaagacagctgtctggaacattatcccccctcaaaaaacaaaaacaaaaacaaaaacactaaaattaaataatgataataataaaataataataataataataataacttacatggaaattcactaaggaaatgttagcatgacttccctcacacactggcaaatagcagtccctttgacacaattagaagtctccaggaacacctgtgttgaactatcacccttccttgacccgtccagcaggccaggttattcgcgggtctcgagggggttgtcacctaaaggggtcatgagggcgagaaaggaatggagaccaagcggcgcaagaaaggacaagagtccgtctgtgcaatgtcaaggtctcgtttattgaaaggtaaagcttgcttatatgcaggggatttttactcagggcggggtaagggagcaggaggaatggaaaattttcaagaggaaatagaggcaaggtaaatcttagcccatggtcccattgttagcgaaccgcagctatttctgagaaaagggagaacattttgcaacatgtattgtgcagcttatccggaaaaaacatcttgtagtcacagcagtgattctggtcatctaacaatgattaactcttgactcagtatgaggccccttttggccctcgacatctcccccttctgtatacaaaaagggatgatgaatcttattatcaagagagcccctgtcttaggccgcataggctgcgcccctggacaggcaacgtgccttgttgagccggtcttgacgacctctgtacgttgttgccccctgttccaggacctatgcatactcccgtcattgagtactcccttgctgcatcaatcttnnnnnnnnnnnnnnnnnnnnnnnnnnnnnnnnnnnnnnnnnnnnnnnnnnnnnnnnnnnnnnnnnnnnnnnnnnnnnnnnnnnnnnnnnnnnnnnnnnnnnnnnnnnnnnnnnnnnnnnnnnnnnnnnnnnnnnnnnnnnnnnnnnnnnnnnnnnnnnnnnnnnnnnnnnnnnnnnnnnnnnnnnnnnnnnnnnnnnnnnnnnnnnnnnnnnnnnnnnnnnnnnnnnnnnnnnnnnnnnnnnnnnnnnnnnnnnnnnnnnnnnnnnnnnnnnnnnnnnnnnnnnnnnnnnnnnnnnnnnnnnnnnnnnnnnnnnnnnnnnnnnnnnnnnnnnnnnnnnnnnnnnnnnnnnnnnnnnnnnnnnnnnnnnnnnnnnnnnnnnnnnnnnnaaagctgtaccaaaatgcaatattcatgtgaaacatcaaggcttaaagcaaatatacagggtgttaatcctgtgttgcaagcccaataggtaccattgggtgcctcaagatagtagcttcctatatagggaattatagttttattgcaaaactgggtgtaactggagggcacctttcctaaacaaagcccttgtcctgaaactccgggcagggtaagttggtgagggacagccctgcaccttgctgatggggaggtgatattggatgtactggccataaaggcaatcccttcataataggggggctcagcagacaagcagagccagcaatctcgagtagaattaggactggatgcatggctagctagataggctccctgtaccaaattgaataatctatctacagtgcctggatctgggctaatagaaggggtaattggggtaagcttaggggtagacgactgggtnnnnnnnnnnnnnnnnnnnnnnnnnnnnnnnnnnnnnnnnnnnnnnnnnnnnnnnnnnnnnnnnnnnnnnnnnnnnnnnnnnnnnnnnnnnnnnnnnnnnnnnnnnnnnnnnnnnnnnnnnnnnnnnnnnnnnnnnnnnnnnnnnnnnnnnnnnnnnnnnnnnnnnnnnnnnnnnnnnnnnnnnnnnnnnnnnnnnnnnnnnnnnnnnnnnnnnnnnnnnnnnnnnnnnnnnnnnnnnnnnnnnnnnnnnnnnnnnnnnnnnnnnnnnnnnnnnnnnnnnnnnnnnnnnnnnnnnnnnnnnnnnnnnnnnnnnnnnnnnnnnnnnnnnnnnnnnnnnnnnnnnnnnnnnnnnnnnnnnnnnnnnnnnnnnnnnnnnnnnnnnnnnnnnnnnnnnnnnnnnnnnnnnnnnnnnnnnnnnnnnnnnnnnnnnnnnnnnnnnnnnnnnnnnnnnnnnnnnnnnnnnnnnnnnnnnnnnnnnnnnnnnnnnnnnnnnnnnnnnnnnnnnnnnnnnnnnnnnnnnnnnnnnnnnnnnnnnnnnnnnnnnnnnnnnnnnnnnnnnnnnnnnnnnnnnnnnnnnnnnnnnnnnnnnnnnnnnnnnnnnnnnnnnnnnnnnnnnnnnnnnnnnnnnnnnnnnnnnnnnnnnnnnnnnnnnnnnnnnnnnnnnnnnnnnnnnnnnnnnnnnnnnnnnnnnnnnnnnnnnnnnnnnnnnnnnnnnnnnnnnnnnnnnnnnnnnnnnnnnnnnnnnnnnnnnnnnnnnnnnnnnnnnnnnnnnnnnnnnnnnnnnnnnnnnnnnnnnnnnnnnnnnnnnnnnnnnnnnnnnnnnnnnnnnnnnnnnnnnnnnnnnnnnnnnnnnnnnnnnnnnnnnnnnnnnnnnnnnnnnnnnnnnnnnnnnnnnnnnnnnnnnnnnnnnnnnnnnnnnnnnnnnnnnnnnnnnnnnnnnnnnnnnnnnnnnnnnnnnnnnnnnnnnnnnnnnnnnnnnnnnnnnnnnnnnnnnnnnnnnnnnnnnnnnnnnnnnnnnnnnnnnnnnnnnnnnnnnnnnnnnnnnnnnnnnnnnnnnnnnnnnnnnnnnnnnnnnnnnnnnnnnnnnnnnnnnnnnnnnnnnnnnnnnnnnnnnnnnnnnnnnnnnnnnnnnnnnnnnnnnnnnnnnnnnnnnnnnnnnnnnnnnnnnnnnnnnnnnnnnnnnnnnnnnnnnnnnnnnnnnnnnnnnnnnnnnnnnnnnnnnnnnnnnnnnnnnnnnnnnnnnnnnnnnnnnnnnnnnnnnnnnnnnnnnnnnnnnnnnnnnnnnnnnnnnnnnnnnnnnnnnnnnnnnnnnnnnnnnnnnnnnnnnnnnnnnnnnnnnnnnnnnnnnnnnnnnnnnnnnnnnnnnnnnnnnnnnnnnnnnnnnnnnnnnnnnnnnnnnnnnnnnnnnnnnnnnnnnnnnnnnnnnnnnnnnnnnnnnnnnnnnnnnnnnnnnnnnnnnnnnnnnnnnnnnnnnnnnnnnnnnnnnnnnnnnnnnnnnnnnnnnnnnnnnnnnnnnnnnnnnnnnnnnnnnnnnnnnnnnnnnnnnnnnnnnnnnnnnnnnnnnnnnnnnnnnnnnnnnnnnnnnnnnnnnnnnnnnnnnnnnnnnnnnnnnnnnnnnnnnnnnnnnnnnnnnnnnnnnnnnnnnnnnnnnnnnnnnnnnnnnnnnnnnnnnnnnnnnnnnnnnnnnnnnnnnnnnnnnnnnnnnnnnnnnnnnnnnnnnnnnnnnnnnnnnnnnnnnnnnnnnnnnnnnnnnnnnnnnnnnnnnnnnnnnnnnnnnnnnnnngctgaacagtagggttaattaaggagagaataaggtcatcggaggagggaggtcctggggggaaaatggtcaggggtttccctagtctggagaggcacctaaggctaaagcacataaaccaactatcaggggggaataggaggggggtggtcgtaatagttgtggaaacattggcagcatcactggcttggnnnnnnnnnnnnnnnnnnnnnnnnnnnnnnnnnnnnnnnnnnnnnnnnnnnnnnnnnnnnnnnnnnnnnnnnnnnnnnnnnnnnnnnnnnnnnnnnnnnnnnnnnnnnnnnnnnnnnnnnnnnnnnnnnnnnnnnnnnnnnnnnnnnnnnnnnnnnnnnnnnnnnnnnnnnnnnnnnnnnnnnnnnnnnnnnnnnnnnnnnnnnnnnnnnnnnnnnnnnnnnnnnnnnnnnnnnnnnnnnnnnnnnnnnnnnnnnnnnnnnnnnnnnnnnnnnnnnnnnnnnnnnnnnnnnnnnnnnnnnnnnnnnnnnnnnnnnnnnnnnnnnnnnnnnnnnnnnnnnnnnnnnnnnnnnnnnnnnnnnnnnnnnnnnnnnnnnnnnnnnnnnnnnnnnnnnnnnnnnnnnnnnnnnnnnnnnnnnnnnnnnnnnnnnnnnnnnnnnnnnnnnnnnnnnnnnnnnnnnnnnnnnnnnnnnnnnnnnnnnnnnnnnnnnnnnnnnnnnnnnnnnnnnnnnnnnnnnnnnnnnnnnnnnnnnnnnnnnnnnnnnnnnnnnnnnnnnnnnnnnnnnnnnnnnnnnnnnnnnnnnnnnnnnnnnnnnnnnnnnnnnnnnnnnnnnnnnnnnnnnnnnnnnnnnnnnnnnnnnnnnnnnnnnnnnnnnnnnnnnnnnnnnnnnnnnnnnnnnnnnnnnnnnnnnnnnnnnnnnnnnnnnnnnnnnnnnnnnnnnnnnnnnnnnnnnnnnnnnnnnnnnnnnnnnnnnnnnnnnnnnnnnnnnnnnnnnnnnnnnnnnnnnnnnnnnnnnnnnnnnnnnnnnnnnnnnnnnnnnnnnnnnnnnnnnnnnnnnnnnnnnnnnnnnnnnnnnnnnnnnnnnnnnnnnnnnnnnnnnnnnnnnnnnnnnnnnnnnnnnnnnnnnnnnnnnnnnnnnnnnnnnnnnnnnnnnnnnnnnnnnnnnnnnnnnnnnnnnnnnnnnnnnnnnnnnnnnnnnnnnnnnnnnnnnnnnnnnnnnnnnnnnnnnnnnnnnnnnnnnnnnnnnnnnnnnnnnnnnnnnnnnnnnnnnnnnnnnnnnnnnnnnnnnnnnnnnnnnnnnnnnnnnnnnnnnnnnnnnnnnnnnnnnnnnnnnnnnnnnnnnnnnnnnnnnnnnnnnnnnnnnnnnnnnnnnnnnnnnnnnnnnnnnnnnnnnnnnnnnnnnnnnnnnnnnnnnnnnnnnnnnnnnnnnnnnnnnnnnnnnnnnnnnnnnnnnnnnnnnnnnnnnnnnnnnnnnnnnnnnnnnnnnnnnnnnnnnnnnnnnnnnnnnnnnnnnnnnnnnnnnnnnnnnnnnnnnnnnnnnnnnnnnnnnnnnnnnnnnnnnnnnnnnnnnnnnnnnnnnnnnnnnnnnnnnnnnnnnnnnnnnnnnnnnnnnnnnnnnnnnnnnnnnnnnnnnnnnnnnnnnnnnnnnnnnnnnnnnnnnnnnnnnnnnnnnnnnnnnnnnnnnnnnnnnnnnnnnnnnnnnnnnnnnnnnnnnnnnnnnnnnnnnnnnnnnnnnnnnnnnnnnnnnnnnnnnnnnnnnnnnnnnnnnnnnnnnnnnnnnnnnnnnnnnnnnnnnnnnnnnnnnnnnnnnnnnnnnnnnnnnnnnnnnnnnnnnnnnnnnnnnnnnnnnnnnnnnnnnnnnnnnnnnnnnnnnnnnnnnnnnnnnnnnnnnnnnnnnnnnnnnnnnnnnnnnnnnnnnnnnnnnnnnnnnnnnnnnnnnnnnnnnnnnnnnnnnnnnnnnnnnnnnnnnnnnnnnnnnnnnnnnnnnnnnnnnnnnnnnnnnnnnnnnnnnnnnnnnnnnnnnnnnnnnnnnnnnnnnnnnnnnnnnnnnnnnnnnnnnnnnnnnnnnnnnnnnnnnnnnnnnnnnnnnnnnnnnnnnnnnnnnnnnnnnnnnnnnnnnnnnnnnnnnnnnnnnnnnnnnnnnnnnnnnnnnnnnnnnnnnnnnnnnnnnnnnnnnnnnnnnnnnnnnnnnnnnnnnnnnnnnnnnnnnnnnnnnnnnnnnnnnnnnnnnnnnnnnnnnnnnnnnnnnnnnnnnnnnnnnnnnnnnnnnnnnnnnnnnnnnnnnnnnnnnnnnnnnnnnnnnnnnnnnnnnnnnnnnnnnnnnnnnnnnnnnnnnnnnnnnnnnnnnnnnnnnnnnnnnnnnnnnnnnnnnnnnnnnnnnnnnnnnnnnnnnnnnnnnnnnnnnnnnnnnnnnnnnnnnnnnnnnnnnnnnnnnnnnnnnnnnnnnnnnnnnnnnnnnnnnnnnnnnnnnnnnnnnnnnnnnnnnnnnnnnnnnnnnnnnnnnnnnnnnnnnnnnnnnnnnnnnnnnnnnnnnnnnnnnnnnnnnnnnnnnnnnnnnnnnnnnnnnnnnnnnnnnnnnnnnnnnnnnnnnnnnnnnnnnnnnnnnnnnnnnnnnnnnnnnnnnnnnnnnnnnnnnnnnnnnnnnnnnnnnnnnnnnnnnnnnnnnnnnnnnnnnnnnnnnnnnnnnnnnnnnnnnnnnnnnnnnnnnnnnnnnnnnnnnnnnnnnnnnnnnnnnnnnnnnnnnnnnnnnnnnnnnnnnnnnnnnnnnnnnnnnnnnnnnnnnnnnnnnnnnnnnnnnnnnnnnnnnnnnnnnnnnnnnnnnnnnnnnnnnnnnnnnnnnnnnnnnnnnnnnnnnnnnnnnnnnnnnnnnnnnnnnnnnnnnnnnnnnnnnnnnnnnnnnnnnnnnnnnnnnnnnnnnnnnnnnnnnnnnnnnnnnnnnnnnnnnnnnnnnnnnnnnnnnnnnnnnnnnnnnnnnnnnnnnnnnnnnnnnnnnnnnnnnnnnnnnnnnnnnnnnnnnnnnnnnnnnnnnnnnnnnnnnnnnnnnnnnnnnnnnnnnnnnnnnnnnnnnnnnnnnnnnnnnnnnnnnnnnnnnnnnnnnnnnnnnnnnnnnnnnnnnnnnnnnnnnnnnnnnnnnnnnnnnnnnnnnnnnnnnnnnnnnnnnnnnnnnnnnnnnnnnnnnnnnnnnnnnnnnnnnnnnnnnnnnnnnnnnnnnnnnnnnnnnnnnnnnnnnnnnnnnnnnnnnnnnnnnnnnnnnnnnnnnnnnnnnnnnnnnnnnnnnnnnnnnnnnnnnnnnnnnnnnnnnnnnnnnnnnnnnnnnnnnnnnnnnnnnnnnnnnnnnnnnnnnnnnnnnnnnnnnnnnnnnnnnnnnnnnnnnnnnnnnnnnnnnnnnnnnnnnnnnnnnnnnnnnnnnnnnnnnnnnnnnnnnnnnnnnnnnnnnnnnnnnnnnnnnnnnnnnnnnnnnnnnnnnnnnnnnnnnnnnnnnnnnnnnnnnnnnnnnnnnnnnnnnnnnnnnnnnnnnnnnnnnnnnnnnnnnnnnnnnnnnnnnnnnnnnnnnnnnnnnnnnnnnnnnnnnnnnnnnnnnnnnnnnnnnnnnnnnnnnnnnnnnnnnnnnnnnnnnnnnnnnnnnnnnnnnnnnnnnnnnnnnnnnnnnnnnnnnnnnnnnnnnnnnnnnnnnnnnnnnnnnnnnnnnnnnnnnnnnnnnnnnnnnnnnnnnnnnnnnnnnnnnnnnnnnnnnnnnnnnnnnnnnnnnnnnnnccatgacgataatgggacagcagtacttacctcgagacagaccggtgcacgagcgatgcagggcgtctccattttgggtcggctagcctcttcttctcttggcgctgtccggagaccaccgtacctcgagccccacgttgggcgccacttgacccgtccagcaggccaggttattcgcgggtctcgagggggttgtcacctaaaggggtcatgagggcgagaaaggaatggagaccaagcggcgcaagaaaggacaagagtccgtctgtgcaatgtcaaggtctcgtttattgaaaggtaaagcttgcttatatgcaggggatttttactcagggcggggtaagggagcaggaggaatggaaaattttcaagaggaaatagaggcaaggtaaatcttagcccatggtcccattgttagtgaaccgcagctatttctgagaaaagggagaacattttgcaacatgtattgtgcagcttatccggaaaaaacatcttgtagtcacagcagcgattctggtcatctaacaatgattaactcttgactcagtataaggccccttttggccctcgacacttcctggattttagagagagagaagcaaaaaagaaaaaaaaaggctgctggacaattaaaggtactgccaagaagctatgagaataaggcagacaggcttgatctgttgggtttcatttatttatttatttatttatttatttatttatttattatgtgtacagnnnnnnnnnnnnnnnnnnnnnnnnnnnnnnnnnnnnnnnnnnnnnnnnnnnnnnnnnnnnnnnnnnnnnnnnnnnnnnnnnnnnnnnnnnnnnnnnnnnnnnnnnnnnnnnnnnnnnnnccctgttgggttttttaattgaatgttttattttgaacttaactgtagatttacatgcaagtatgagactatttcaaataaaataaaaggaaaaaaaatactatagagtgatcccaagtaccttttgcccaatttcccccagtggtaatttcttgcaaaatggtatctcaggggactagaagatggcacaatgtgcttgttgcaaaagtgtgaggccctgagcctgactcctcagcacctctgtaaaaagccagcagggcatgtctataaccccagtgccagggagccagcagggcacatctataacccagtgctgggaaggcagtgtcttagggtttctattgttgtgaagagacaccatgactgttatgtttttgaagaaaaagagaaaggcgcaagatgagacatattagccattttattataagcccagcagagtatggagactaaagacagaagagaaacagggtaaatggctgaccgccatggccagtcgccatagagaggcagagaaagcgtgtagatgggagaagaaagagtgaagcagaagtgagcagagagaatagagagcaaagagagcaagcagcagggaagttggaacttttaaagggaagactgtgcatgcgcactgaggttccacacatgcccagagtcctcacacatgcatggtgggtgatatggtgatggcacgtccctgtgtgtgccctgactgttgtcagggggcttggtctgtaattaaagagatattgccaatcagcattaaagcctgaacctttcaatgaccatgaagggaccagctccccatttcagcagccatgacagtaacacgtgctctatgacattgtcttagtcactagaggttaggtgcctgcctggtgacaaggaaccaatcagaagttagctggtggcgctatgctttactaccctgggtgtactttaggacaagcacacagcaatgacgaagagcatagcaaccaccctgggagggcctatgggccataacaaccagtagaccaatcaacacagggcaagtcctcctgagcctgtgcgtaccccactccccttacgctgccctacaagatctcttgggaggccccaggagttgtctttgctagccatccgccatggcgggtgggtgaaagactcgagctaacatggggttagctcattaaattacaataaagcctcatgctttattttgcatcaagctctcgaatctgcctggtgattggggtgactgcattcgtggcctgggaccccggatacctgagttttccaggggtctaacaagctcagggttccatggttgtatagtctgcaggaaggtgcaaaggacccctttaaaagaaagactccccctttaaaaaaaaaaaaacccacccacttaccctcctcattttccctgtttcccgctgttcccgtgggattaggacttttcctgtctccctcttctttcctgtcttccctgtgtctctttacctcttaccttacctcccacctcaataaaagtttcaatatgagttacatctacagatctctgtttccccatctgccagacatccatcatctactcacccaccccaaccccacccaagacttcaatcctcgtggtcccagaacggactggggaccaccaccttcggtaccaacccattagtatttattcctaacaggtgttgtttgggctttttaacaatgtgtgtgcatgtgtttgtcacaggtgggggcatggttgtgaaggtcagaggagggtgtcagatgccctggagatggatggagttcctggaagttgttagcactgggacaaggggcctgggaaccaaacaaagatcctctggaagagtagcaatcactcttaatcaattaaccgtctcttgctttttcaagacagggtctctcgtaggcttgactggtctcaaacttactatgtagctgagggtggccttgatcctcctgcctccacttccttaagtgctgggattacaagcaccatacaatttatccgcctacctttgtttgcctcccatgttctgggatcacaggcatgtgccaccacgcccagataacacccatccttttgactattaggtaatctttctggaatgcacaaacaagaactcctagtttccaccaacccaaacactaagaatgtcatcagataacatctgagacccatagcagagattcccacactacaaacccaccttcctgatgtttccatcagggtgttaatttttaaatttttacattaatgggtcttttgcttgcatgtgtgactgtgtatcacatgtgtgcctgctgcctgaggaagccagaagaggggaactggaactgaaattatagaccattgtgaactgccatgtaggtgctaggaatttaatctggatcctagggaagaacagccagtgttaattactgagttctctctcccttactattttatttttgaaatagggtctctggtagcccagccagccttgaattcactttgtagaagatgacctggaacttctaatcctcctggcccagctccccagtgataggactgtatttgccacaatgacccattttaggccaagtggtagtggtgcaggcccttaatcccagcactctggaggcagaggcaggaagatgtctgtgaattcaaggccagcctggtctacagagctagttacaggattgccagggtaacaactagaaggactggaggcagaactctgtttaatagcacagagaaatcctgtatcaaaaagcaacaacaaaaagacaagttttatatggtgctggggatggaacccagagtttagactatgctagataggcattactaactgaactacacccaaaatctcaatatatcctaaaaatgtctttaatcccagcactcaagagatagaggctgttttgtttttcaacattttttccttcctttctgtttcttctgctttcagtactgatggaagccatgacctcggagcatgtggcatgtagcagccaagctaccattgagcaacattcctacctattgttctttcttttttgaaataatttatttaactttactttatgtgcattggtgtgaagataacagatcccctggaactagagttacagacagttatgggaattgaacccgggttctcttaactgctgagccatctctccagcccctgttgtttcttttctttattacatgtacatttttgttgcttttaacacctaggtttgattcatgtgaattattcaacgcaggtatcccaggggcatgacaggagagggtgggggatggcagagcagagtagggggaaagaggtctattagtaattaaactctgggctcatccctccttgggtttcatagactccagaggcatagtctcccagagactcctgaaccttcaaaatcatcgcttaagaagaagcttgttccaatgaatcccagtttcttcaggttctcaatgatgtcatccatgctgcattttacgagaactttcttccccacaccatcactgccaacaacctccatcattctgcctggagcaaagccaaatcccccaacagaagtcctgactgggagaggaagtgcacgacctgtagtacatagatgctgcttaggtccaggcagccctcaaccgtttgtattctgtagtttttagagacaaggttttatgtagcctaggctggtcttaaacttcgtatatagtcaggtatggccttgaactttggcctctcttgtctcacctcccaaatgctgagattacagttatgcattgccacacctggtttaagaggtgctgggaatagggtcttgtttcatgcatgtgaggcaagcattacaaacttttaaaataacagattctttccagatttgataaagagatgcataaggtaagtttaagggggaagtgtcctttagcaatgctgtctacttaaagtgggggaagcagggctaggaggcctaacaaccacccacacacataggagattccttactttcagagactttagtgggaaggggaatttaagtttagaggggaaggttgtctgagtgtagctgattagtgaaggtaacaaaacttagtgaagttttagtgaagtgattagtgaaggatacaaagccatagtttaggacctaatcttactgtcccaccctactcgggggcagctacaatgctttagcagtttaggaaagttattgcataggataccagatgtgccacaagaaggggcagcattctgtgacctaatactaatcaagtaacattaaattttgttatttaattttaagttagagtcttactctgtagctcaggttggcctggatctcactacttacctaaggctggcctcaaactcaaatcattttgcttgtgccaccacattaggcttaagtttatggacacagtcttttattgccctgactgacattgaactgttggtgaagaatctaatgaactcttaattctcctctgcctcctgtaggagtgatcagactgcaggatctagagggcctttttacttagaggccatctcctcttctgggaaaccatctaatttgggggcagatattttttagataaactaattcatatctacacgaccagaggaggggttgtgcagagaacaccagtgaaaagtacagctcacttgaggagtggggaataggtggggtagctagcatctgcctttagcagaagcatttcagaaacacagacaggatctctctgccttcaaggtcgacttggtctacacaatgagttccaggcctgccaaagctacagaatcgagcccctatctcaaacaaaaccagcaaacaaaaaagattagagaaagaacaaaataaataaaagattaggaaaaagattgggagaagagagaagaaaaagtccttctcattatttcacctcccaattttcctacaaaatagccaaatgagtaagtggttctggacattctctaccccctgccccaatacacagggtctcactatataactcctgtgtccaggaattcaggagtttgaggccactgaagcctcaaactcacaactggttatagtatagcaactataccttcccacacccatgcctggtggaactcagagtcacacacttgctgctgagctacacatctagcccgatagctagataaagtgtcttatactagtttcaaaaatatttcaaaacaagcaactctaagccaggcttggtggcactcaggaagcagagaccagcagagctctatgacttagaggctagcctgttctacatagagttccaggtcagccacaaacactcttaagttctgaaagtacaacttctctaaactaccttcaaagtcttcacgcttcagccaatgccctttctcagacttttccacactcctgctgaagaacccaaggctttgtccagattaagcctatgctccaactcccagggatggctgtaacccccacacttacttcttccccacagtttttacctatgacaccccctatggacagcctacccttaagtcttagcaatgttaagtactgcagacctgaaacaccatccctcttttcctcttactgttgcttctctttccaggaatatcctccctggtcccttcctctctaaatgtaccagtccataaagccccttctggcttctccagtcaattaagtacttcctcttttgctcctgagatatttctccataaggattctgcatttatgagataagtaaaactatttgtgataaaatacaacaaaaataagtactgtatttatacaatgtttttcttttctcctaaaccattaacagattttgttcaattcattttcatatgcagtaacacaatgtgtggtgaatattatggtctgagcaaatgattgttgatttgtgtgcgaatgtgtttcacatgggtcaaacttagtcttacaacatgctagagaagcaagcagtccatcattcatctatttcccagtccctgaataaatttttgaagtgcataagttttaatttctagctttctgattgctcaaagcactttagtttaataactactttcaaaataccatcctctttgaatccctttgagggagagggtgttggggcatcaaacctagtgccttgtgcatgctaaatatatgttttatatttatgtgtttgtttatggagaagggtctcactaggtagccttggatggcctagaacttgctaagtaggccagactaagtaggactctacctacctgtatctatccaagtgctggaattaaaggcatgtaccactgagacatatctaaaccctcattaaatagtgactcttgctgggcagtgttggcacaagcctttaatcccagcactttgggaggcagaggcaggaggatctctgtgaatttgaggccagcctggtctacagagtgagttccaggaccggcctttggcctgatgaaaagccctttaagtttatgtttagatgacaaccaaaataaacctaaaaaccttgaacttgtacctgaacagtagatagtcattactttatcagctagcatactgactagtctatagtggatctgactgcctgattctgtcaagctgacaaccagtaatattacagagatctgagaagggtatattttatccgaatctactaaaaagtgacagaagccagttagaagccagtccatatacagttagccaaacccaattctctccattttcactggaggcagatgtctcaaagaacagcaatctttgctgtgagaggttttttcctctgtggaagagggacatggaaaagactgactttgttttgtctacgcaaaggggtacaatcaattttccagtgtccaacagctttgtccacagtctcggccaggtcgtgacaggcaacaagtagcagcacatctgagcatctcgctcactggtcagcatcaccatcatctaggtgcaggaactggggtgcctcataatcttctttggagactttgggtcactgtccggatctggcagtctgtctgatattataaacttttaagataacaattgaaatgccatattctgcagatctctgaagcattagaggtctgtttgtctgttttagttactttccttaagcacacattaagcacataagtggctaggtaatgtcttatttctgtaactaattttcagtatgactgtaactgattttaacttagtaaaatgtttgaacaactgaacttaaaactgcatagcgctaccttatattccttaaacagtagctacatgtacatattttagctgtttgcttaaacttaagttctgaggcagcgtttttctgtgactttggagcctgtcctggaattccatctgtgaccaggctggccttgaactcagaaagatccacctgccttgcctcccgagtgctggaattaaacttaaaggcgtgtgccaccaacaccctgaatttaaaggtgtgtgccaccaacgccctgaacttaacttctgaaaacacaaactgtaacatcttataatagattagcatcttttaaaaaacaagaactttacattgtcaggatttgcttaaaaataattcaaaattgaagctctttaagtacaaacattaataaaaacaaacatttaaactggttttaaaaagaaatttaattcccttaaagtctttatgtaatatatagaagcgttagaagcgttaacattttaaatcttaattgaaaaacttgtttctaagatggtacctctaatttccatgtcaagatggcgatttaagtatcttttttaacttcagcaaaatggctaccagtcagccatgttacaaaacttaggttatgccaggcaacagaacattttaaaacaagtatacataatttacttgagaaataaacagaactttttaaactgaattaacttgatatgattaaaattttaacttatattaccaattttaaaatttaccatttgtagacatgagaaaccataacactttacagtttacatttttctctgacttgtaacaaccttttctatgaccttcaacaactttcctctgaccttctacgacttgctttaaccctctataacttccataacttcctataggcattcttagacaaatttcttttttttttctttctttctctattactttagtatcctacattttctctcatttcttggtcaacatatattcttatcaaagtccttaagtttttttttttttttttttttttttttagaacacccggatcaggacagatggttcccccgcctgagctccatgtgctcagggaagagacctggggggggggggcttctggtaatcccagaccctcagccaatgcaggggtgagaaaaaacccctgcagtccccctgcataccatgtgtgtggagcacaaagaaggcagggcagctagctaggcagatggcggccttgcagccatgttccctcagagccgcaagccaggactcatggcaggagagcagttggggcagagactcccccacttcgcatgcctcacagcccggcaggtggggatagggaaagactcacctgcatcggccaggctcagctctaagggctgcagcagtggttcagaaaagcagtctcgggggactccaacacaacacattttaacctgtgacacatggcagaactcctttctcatgccacatgcttagggcaacaagaaaagacccctgacccatgcatgccaagtgcgtgggcagtagggacagaaagagatgcttaacaaacacacaacacaaatgtgaaacgtggacagccagtacagtaacacagactagggtcctattcggaatttcagatgacttgctcccagctagtccccatcctacagattgtgcgacccacttgggtccccttatagatggaccaggcaacttggtcttaccaggtcccgctcctacagactgcagaagctgtcattcgaacctctgccctaaacaattcttgtacagaaaccatacagaaacaaagactggaaaataaagttacctagtgtggtgccacgtgactcaacgaaagggggtgtcataactttaactgactaactatggtccttaacgtccgtccagtggtcaaaagtcagactgagggtgtagggagccgtccctgcattctccattacaagatggtgcctgcatccggcagacactgaatgtaaacaagattattgcgcaggcgctgggtaattttccattccttgatctctgcctattccgtggcgtcatatggcctgatgagctgcagccaatcatagggtgacacgtcccaggcggcggctgccagcctttattaggggacgggattcttggctcggggtctccgctctggtaagcttatgctctcctctcaagacgcattaaaagctttactgcagaaggatccgaatgccctgtgtcgttcttgctggcgagacagtcgcgcgggacatgaggggggttggttacggtcagtcccatcatcaaactcacaaataagacaaaaacaaactcaagacacacagacaaaaactatcagatgtctgtctccacctagacaaacaaaatcactccagaaatacttcccaatccaggagaattaccgtaccctcaccggctcccaccggctcccagacgggaatctcccaagcgtccctgaggttcccacagacttcctggaaagtcttccagggtggcagtcggtgatctcccaagcacatctactgatcacactctgtctcctccagagaccagagctcttgtctcttcccaagacacgagcgactgcaaagcacagaaccagatttcagccggcacaaaaacacaaagacacagacaatacagggtacccgcttacctccaagatcgactccactcaggtgaggggtggtcgcaaatcccggacgagcccccaaatgtaagacccttgaaaagctgaggcttccagaatcttagcccaggacctcggccaccccaatcacagaatggaggtgaaagcttgatgcaaattgcatgaggctttattgcagtttaacgagctaaccccatgttagctcgggtctttgatgcacccgccatgtcggatggctagcaaagacagtttgaagcggctgcatacagatctttatagggcagcgtaaggggagtgtctaggggtatgcacaggctcaggattggtgtgcctccaggcttggagggcttgccctgtgttgattggtcaactggttgttatggtccataggccctcccagggtggttgctatgctttctacatcattgctgtgcgcttgtccgtaaagcacacccagggttgtaaagcatagcgccaccagctaacttctgattggttccttgtcacgagacaggcatctgactttctagtgactaacttctgattgtttccttgtcacgaggcagggatctgactttctcgtgtctaggacaaggtcatagaagcacgtgttcggccattatggctgccaaaagggaagctggtcccttcaatggggaggaaagggagtcaatacttacatatcaattacctaaattgtaagtcaacactcttatattttgttatagctgcaaacatttgctaactttttcactgccctttgcctcacctaatgactcaggtatgatctttatatagataagaacacttgagactcagggattctaatgaccagctaaggaagtcctctcccaggtgtggtcatcaacttgtcagctgattcatccacagcctgtgggtgttagatttctaatccaggtctggaaaacattttgaatcctttgtgatactcttccaaggtttccttttcattcctagttagtcattctttacacaatctacctgagatgtttcttcaagtcactcttttgaagttaagagttccttctattctccctcctccctccccttcccactttctcttaggtaccggaaagtgcacccagggtccctcacttgctgtgcaactgctctaacactgagaaacatcccagcccttgcctgccttttcctgtaacacatggtatccaattcaaacacagctctgacagtatcctagcacccattcaacagacctgatagaaatacaggtattctaaagaggctctagagcgtgtgtgtgtgtgtgtgtgtgtgtgtgtgtgtgtgtgtgtgtgtgtgtatgtatgtatgtatgtatgtatgtgtatgtgtatatctgactcttagactattcaaaggactcccaaagaaatggaaatttcctgcagggaaactcctgatgggttgggcgttggtggcacacgcctttaatcccagcactccactcgggaggcagaggtaggaggatctctgtgagttcaagaccagcgtggtctacagagaccgtgttccaggaccagttccaaaaacaatacagagaaaccctgtctcgaaaaaccaaaccaaaacaaacaaacactcctgatgggaaaagggaaaggtctcaatttgaggaatttgtctcccagaaagagatttcacacagttctatctagccagaccaccttacaggatgagattgaagacttggactgcttagatgagcctatcagtggtcctctatttaaactttaatctcactccaggaccccagagagccacttatggaaaggttaagtgttgtagaatatttgtacactgtgcttggtttaataacgaactgaatggtcaatagctagacaggaagaggataggcggcacttctagggacaaagaggactctgggaaaaagaaagacaaagtcggcaaccagatattgagaggaagaggggggtataaaattggagaggttaaagcaacatggtagaatgtagattaattaaaaatagatatggattaattcaggttatcggagctagtgggacaagcctgagctaaagcaaaactttcataattaataagtatccgtgttgttatttgggaactggcttgtgggacagaaaaagactcactacagttaactatctctttggccctcttcccagtgtggccacgttaagtcaatctcctttttctgttttttactggtttttgttcgtttgtattttgtgtttggtttttgagacaggacttcactgagggctctagccgacctggaactctctaaacagaccacacgggagatcctactgtctctgccttcagagtgctgggattaatggcttgcaccaccacacgttgctttccacttttttcagtggtttattgactgggtggcccaccttggcttggggcaccggttgtgacccccctctaaattcggttaacacccatttggtctaatctgtcttcgccacacaccaacccaagcagtttcttcctgatttcctagcctccattccccatgacgaaagagctgtttccccaggtgtgaatcctagacctcctcccatcatggctcatctatctcaaacacatcaattctaacagacatttctggcagtctcgtgggctgacgccctaacgcctgctgccagtttctgcatctggtgcctgagaaactgaaaactcttgcagccgccaccaaagtagcctgcgccttacggtgactaatttccattactgctttggggcgtggagtagaccaccttggccagacgttctcaccgaacacgcgctcgcacacactacgccctggaaccaacccgggattcccagcctgtggacgctcccattgccgccagcgagagggagggcctccggctcacggaacgcctctctaacgagttcctgtgacctccgccttcgcacattctcgnnnnnnnnnnnnnnnnnnnnnnnnnnnnnnnnnnnnnnnnnnnnnnnnnnnnnnnnnnnnnnnnnnnnnnnnnnnnnnnnnnnnnnnnnnnnnnnnnnnnnnnnnnnnnnnnnnnnnnnnnnnnnnnnnnnnnnnnnnnnnnnnnnnnnnnnnnnnnnnnnnnnnnnnnnnnnnnnnnnnnnnnnnnnnnnnnnnnnnnnnnnnnnnnnnnnnnnnnnnnnnnnnnnnnnnnnnnnnnnnnnnnnnnnnnnnnnnnnnnnnnnnnnnnnnnnnnnnnnnnnnnnnnnnnnnnnnnnnnnnnnnnnnnnncggcctcgggcgccgggagatcgcgtcccggaacaggtaagagtgggagccagcgcggaatgaatgggcagccggccgcgggtgccggtccccgcgcctggctgcggcgtcgcgtcggggaggaagcgctacgccgctcagggtgccgggttcggtatttgtatctgatctacctaatcccgggaggccacagggaccctctcccctcccccagatggtcacacgttttgcttcgttttacccccggatgcagagcggttacgtttcggttgcccagactgcttagggacatctttatgaggggggaaaatgtaaaaaaatgacacttgaccgtgggtttgcagggcctacgggctctgaatcttcctcaagccgcgtcagtactagcacgtgttggctctccaacgtttttgatgggggttttttgttttgttttttggcggggggcgggggggcttccactccgactcttaaattcctgggtgaagcaattgtaaatcaacctttccccaggagtcaatcctatacatcacccctcagttttgagtgtcctctttctacctaagggcagatttcgaccatcacaaactacatacaaattaagtatggcttttaaatgaatagtttctcgctcagatcaaagcaactattctatgtaatatctttttcaaacctagcaactacttcataatacttttctagaaagtgtaatttggttgttacctcaaattaggttattgcctccaacatatttgtatgaccatccttatttactagggtacattttggtcgagttttggattagttaaaggacagattgcacaccagaaagtataggttcattgaggctttcttgtttgtttttcaagacaggttctccatctggctctagctgtcctttaactgaattgtagacaaggctgggttgtaatttacagaggtctgcctgcctctgcctccctagtactgggatcaaaggagggcctccaccactgcccacttgattgaagccaaaaccttaagccatcatcaacaccttattggcagacatttagacttcgaattttttttttaattaaggtgtttaaatgggtgtggtggcatatacctgtaatcccagcactctggctaaagcaggaggatcaagatttggagtgccctcccacccggatacagtcagtacagtgtatcactcagcacaggtgctttaatatagaagacataacattagagattctaagctttaggctgttcagaagagctttctttccatgaagaggtgagattggggccccaggagatggctcaaatggtgaagatgcttgttaccaaacctgaagacctaagttcagttccagggatccacgtgatggaagaagaggactactaactccttcagggtgtcctctggcaaccacatgtgcctacgcaaatataaatttattcgtttatttattttggttttttgagacagcgtttctctgtgactttggaaactatcctagaactagctcttgtagaccaggttggcctcaaactcatagatatccacctgccactggctctcaagtgctgggattaaaggtgttccccaccaacgcccatcttttgtttttcaaacaggtgagattaaacagaagcagatgtggtgactcctttctgcttgttttggagacagggtctcagtgtagcctttactgtcaaggaggtctgcatccatgcgttgggactaatggtgctgcttgtctaggagcagttcttgaattcaaggccagactgggctgctggtaatgagttccagtactgtgtgtcctgaagtgagatccttaagggatagggttttcacaaaggtttgtttcattaagtgaaacaccttttattttcatggttaaatttgtagtgtcagaagggtagggccaaagttcctggcacagtaatgacagttcttgatactttcaggactcagaaggtggctggtgcttgagctggactttgaaaatatggttagggttgaaagggttgaatatgaagcattttattgaagaaaggcagcaaaaaggaaagaaacttttttaaagagtgaaagaagaaacactttgcagagtggacagtattttcctaaatatcttagaaacaacatttgatttctaagaattaatctttgtgtgttttttatgctacatgtgtggtagtacctgaggagaccagaagagggcattggatcctgggactgaagttagggaccctggaaaagcagcaggactctggctactgagctgtctctaacccctccaccttcccttttctctcttagggttagacctagacctttgctcttgttaagcagattcttttttcttttagagaaagggtctgatgttgcccaggctgatcttaaactttgttatgtggctatagataacaacaaactcctgattattcttcccttacctacaaaatgcaaggattacaagcatggaccactatgccaagcaagcagattgtccctaaacaccccagacttgttcaaaaggccctgaaggaactgaaagctactctatctcttaatgaggagcagtagtaactccagctatacattcatactctaacttgatcttgcaattggatgagcacagtctcttccagttctcacatactgtattgtatgggcttaaaagggaaccttggggagtgatcttactagccatgttgctttcctctccaaagcaaagacagcatcctgcagttactgtgctgcagagtagtctgtgggcttggaaatgctattctccagatccctcctcctcgcatgaacatttgcaaatcctttaactttggttgctgtatcttactgacagatgtcatccagaaaagatttaacacatatatccacaaactttgttgaacagtgtacctactgttccccatgctaactacagcaggaattgagaacaatctttgtggccggagttgttgggccaaaactttgaaggagccgaagaagagtgtacactgaagaggggatagtagtggaacagggagaacaccttcatgaaaatgcacagttacaggtttggtttcctcaagacaaacttgaattctatccagcaaatgtcgctggtgcttctatgggcttgggaatattttatgagctttaccccgcctttccaaagctcctcccccattttattttatgtttaggggtattttgcttgcatttatgtctgtgcaccatgtacatgtctggtgcctgaggaggtgagaagacgacattggcttccttggaattggagtaagccgctctgtaggccctggggaagagcgcaagtactcttaactgctgagccttatcttcagccccagctgctacttagaagtttgaggcgccatgaagagcattctgaaagaaggagaagtaaggccgttgccctggtgtattgggaggagcaggaagaagggaaactgagccacatgttaggggtcacctacctctgactctcagaacttacagggcttccatagccttttaaatagtggtcatcatactttaggaaatacttagaacttgagcgtttagccctgtggtaaagccattcggttagctagggtgttctggatttattttgtcctatgtgtctttgggttttcctgtgctgaggattgacctaggggattcccttaacacatggtaaacgattctgagacactgagctacatcccaggcccttagagttgttgtgttctataatagggtcttcctgtggaaggaagaagactacatggccttgaatagaacactcttagcatgagcccagcatgatagagattagacaagagtgctcaggggaaaagaaagatgaagaatacaaatgtctctgtaaacctttttctttttccggtgtcaaaaaatgtcagggcccactcaggttttctgaacttttgatagctgtaagttgaacctgaacatttggtggtgttctgtctggcatgaccttgtggggtgtataagaagacttgcttcagtaagggctttagaagcctgcctacaattcttattgatatatttcttataccttcaaaaattcgagattggtatgaaatgatagggtttgtgcaaaaagaaagtttaaagtcaccttgagaatttgagtaatatgagaagtcatgaaaggagtatcagagtgttcattcccgctctatagcaagttcaaggccggcctgagaggcataagagcctgtctccaaagtatacaatacactaaagtcagagaatgtaactcattggtacagcccttcattcagtcctcagaaccagcaacaggtgtttacagtgatgtttctaggaagtcccttagtcctcgagcattgtttctcagttttcctgtgtctccctttttatctggctttcctacaactctctaaatccagtgctgggtactgaatcctataccttttgcatgctagggggacactgccattgagctaaattgccagttggtggctctaagtgggaagggcatctggaaagtggcagttaggcctctctatagaatgaggaagccagtggagaccatgctctatgccagaggtactgaagctgccttctgtgttggccatcataacccttaatttccctgctcagaaatacccttgaaaagtaagcaggatggtacaagcttgtggtgcctgccctcaagaggctgagaccagaggatgtcaagtttgaagcctgcctagtctgcataatgaggtcctgtctcaaaaacaacagtggcaacaaaaatcaaaggggaaaggtctaaataaatatgccttggatgtgtgttcatagattgctcctgattggtctgcttcactttgaggacaggcatgcttacaaggcctaagatatatcacccacttttccttagagctgtagctaaaattagtacagctgtttaaaatttctattttaaatatattgtttgtttgcttatgtgtgtgtgtctgtgcacgtgtgtaggttcctgaggaggtcataagaatgtattagatcagccgggcgttggtggtgcatgcctttaatcccagccttctggaggcagaggcaggcagagctagttccaggacagcttccaaaagccacagagaaaccctgtcttgaaaaaccaagaaagaaaaaaagaatgtattggatcacatggagctggagttacaggaggttgtaagcctcctgatacaggtgcaaggaatttagcttattgatggcataacttctggttctctgacattgattcactttaatttttttagatttattcatatgcatgaatggtttggttgaataatgtgtatgtgtaacacatgggtgcctgggacccttcaaagtcagaagagggtatcatctgctggagctggaattacaagtgcttgtgagtcacactgtgctaagaaccagacccaggtcctctgcaagagcagtaagcactcttaaccacagagatctctctccagccctacgttttttgtaatgtagatatatgtgtttgtattgctaccttatctagaactactaggcccagtgacttatttatagtgtgccagataatgagcttccattttaaaaaataatgtagcattttacttgagttgtgctttattgtttgtgacatatctcattgaatagcccagtggaattcacttgtgtagcttagtctggcttcccactcaatgtgtactaaagattgggtttgaacctcttgccatcttagcttaacctcccaagtgattacaatcatgtgctgccactcccaggaggctttggaaattcttgtatgaagttgtttttccttgtttcttaagtggcagaaaacttggctgattttatgccaactgtgtaaactctggggtggggagtgaagcaggtgaagagaccgatagaaaggtcgcactgtgtagtactattggacctggaatggacagcccaaccttgaactcatagagctccacctgcatctgcctccctagtactaagatgaaaagtatgagtaaccattcccagctacagtttcattttaataaaagttaaagcaaaagttggcaaactttctgtgaagagccacctggtaaatgttttagtcttctctgcccatgtctaactaacccttacagttggagtatgtgaggtttcacagacagtatgtaatatatagactatggacactgaaatttgaattttacactcttttcacatgtactttatttttctcaactacttttaactgtagaagtgatttcatagattactagcagcagcacaatgccaggacagcagcagatttgggccatattctgtggatcctggtgtagagaactctgtgctatcatcagaatctccctttgggttttcaaagctgtcaaagcagttcattcttcaaagcattcttcaaagtattaatgttagggaggggatgtcaccagagaatgtacaagtatatgtaaaaggatttctttagagatattttctaataaggctgtcatgactggaaatatggctcactcaaccttttctggaacatgctttggctttctcatctactctctgactttctgcctgctgtgacactgtgtctaggtgcgtgtatttttagacatactagattgagagttatgaccttcactggatatctggaaatgccactcaggtcatggcactgctttgtacactttgtgctgtaacagtgtgtgtgccttaatggcagtgacgtcgatagatggagaaggtgaaacttgacctctgatgactcctggcacaaaatatgggctgatttgtatgcctggctgctcccagcaggagccagcaagcactgttggaaatgctgacactcacagtccaaggtgcagcaggtaacttgctccagggcccaaactgcagtgacatcagtatccacatctggaatggtgatttacaagattgctaggaagagtaatgggaacacagaagtaactggcactcctaacagcttgctctttaagccccaaagtgtgtttcattaagcactggagaattgctaacgttaagacagtcattcagatgtgctaggtacctctattcacagtcttacagagctatagttgatttatttaataagcataatgctagagattgaactctgggtcttcctcatactatgcaaacaattcaccactccctcacacacgtaccactctattattattattaaaacttaattttttattttattgtactgggtaaatgccccaccaccatacaccaccagccctgccaacatttgctaaagcaccatgctgtgtactgtccctgtcttacatggtggtacactctgctaatcttagcacttgggttgtgagaggaaaaatggttcaactatccaaggacatctaacgtttaaaaaatctggtagcagccagttagtggtggggcacccctttaatcccatcatttgggaggcagaggcagtcagatctctgagttcaaggccagcctgatctactaacttgagttccaggacatccaggactacacagaaaatccctgtcttacataacaaacagcaaagtcagtaatgtgtgggcatagacctagacatgggtgcttgaatattggattccttaaaatatattaaatatgcagcatagccagtgcccctggaggatattttgcgtgaactttaacccacttgccctgaaagtggccacatttattctggaaccgaccctaataagcctaatgagaaaattagctgccaaatttgctgtcttaactttgaggtagttgggctcatggccagcagatggcagcattgggctgctggtacttgtcatttatagtgttgtgttatatacttcactgttccacgtttccctgggccaagattgatcagctttcaaatcctcctaggtgtatacctaagacaatcctggtatttgcttattctttaccttttagtcttttcttttttagttgggtcatgctggagatactcagctcaaactgagaaacattatccactaactggacagttgggcacgaagaatagtaactgggtaactagagcatggtgaggtgatttgcttttaggactgcttgggaactaggtaggaccagtcagtttgggtctcaactagtgagattgcctccaaagatctaattagaaaggaaaagctgtctttttttaaatcaccatcttgttccacacagctagcagatgttacagctcagttaaacacttgcctagagatacaaagtcctggatacagtctctgtctctgaagagaaaggactaaataaagctagatatggctttctcttgtttaatgtagtggtggagtgtttgacctggcctagctctgtaaccctggctgctctgggacagtatagaccaggttggtcatgaccttgaagcagtcttacctctgcctcaagtgctaggaccaaagtccctactaacatgcccagtgatacaaactattaagttcctttagcaggatagaatggtacatgtccttaatcccagcacttggaggtggaggcaggcatattaggaatttgaggctaaactctgttcaaaagtttgaagccagcctgggctactagaggcccctaagactccatttcaaacaacaaaattctttggttctcttagtacctttgtttcttctgagacagccaagctgtcttgaactcatccaggaatacaaactgggttgaacttaaatgttccctgctacaagtgccacatcttctgaggaataattgatggtgcatcaagacagccttgaattccatccaccttgcacccctcccccacatcaataaaatgtaaagacaattttcagcaatgtttttgcaaaaatggctttagatctgtgtggggttttttgttgttgttgttgttgttggtttttttttttttttttaatcttcatgatcatcctgaacttacaaagatgcatcgaggaaagtgtagttagatggtaatgtcaactaaattacctgttggcagacagcagttagaaaacagtctgtaaaatcagttaccactagataattgagaaatcccatcttcagtaggagaaagggcaggatttcttcaactgcttgtgcatgcttgcagagtactgggaagagttttagatggtcccccaacctagtccacatgcatgacttacatcagaagtgcaagggctgacaacaggatatatttttgaagctctcagtgatagtgagccaggctggggagtcattagtatgattctaggtagttgttcagttatgttaatgtatagggctagggatgtactgctttaaggtgtgatgtgtttagatgcttatttattgcaaggagtagtgctgttgggttactctcctggcaacgggctctttaagttaggctggttctccattgtgctaacttatgactaaaataaaaactggcattttcttttcatggtaagccaacttcagagctgaggtgcaactgtcagatttccctgttgttcattttttactgtcataattccaacaatagttggcacatggctgctaaaagtatttttaatcagaaggagaaattgcagagtatgcttttcaattaaagaaaagcaatagctaggggtggtggcacacccagcactctggaagtagaggcaggtggacctctgagtttgaggccagccttatctacagagctagttccaggacaggcttcaaagctacacagagaaatcctgtctcaaaaaacaaataagcaatgccatctacctgcatgccagcccttcacattccttggggtgtagctcagtggtagagcactggcctaatagtttcaacctcaaccaataaatagaatggtctctgttacataacagcctgcttactctgtattcagatggtgaactttgagatacagttttaatcttgtagggtaggtgagttttcatttctcttgaatacatgcttggaagtaaaattattgtgctaacctgcttttcactttttaaaatctttaacaaactatttcaaaatagctataccattttaaatttgcatcaaacaacatgctgtccataggtacttggcccttttagtctcttttatgtctcatgcttttgagtgctatacagaagaactctgtctagccgggcggtggtggtacatgcagatctctgagtttgaggccaacctggtctacagagcaagattcagaactgtcagagctgttacacagagaaaccctgtcttgaaaaacaaaagaaacaaacaaaaaagaactctgtctggcttacaagacttttcatgtgcccttttcttaggagtataatttttttagcttatacctgtaacagcagcattgggagactagttctaggcaggtttgggccatagtgtaatactttgcctcttggctgagttgttttttagtttttcaagacagggtttctctgtgtagctttggagcctatcctggcactctctctggagaccagctggcctcgaactcatagagatcagccttcctctgcctcccgagtgctgggattaaaggcgtgtgccaccaacacccagctatgagttgttctttttgttgtgctggggcattgaacccagggctttgctagataagtactctaccactgaactgcattcttagctttgattgattgattgattgattgattttattgagataggatcttattacattgcctaggctggccttgaacttactttgtagtctatgcagataaagaactcactgtccccctgcctcagcttccacagtaactgtggttacagatctgtgccagcagacatggctcaggcctttgttttactttcttgtttatttttaggttttttgtttgtttgtttgttttttatgtgtatgtctatatgactgtgtgccacctgtgtgccatgcccagaaggccagaagatggcgtcagatcatttggaatgagaaacagtagtatgctgcctacctggtatgggtactggtactgaaccttcttcccagccttgcttacttgaatatatatatatatatatatatatatatatatatatatatattcatatgtatgattgatttattgatttattttattctctgtgtatgtctgttttgcctgtatgttgcatgtgcacctcatgcatgtctggtgcccatggaggtcagcagagagtgtcagatcccctggaactggaatcatggttgtgagccaccatatgggcactgggaactgaacccaggtcctttccaagagcaataaacaatcttaactgaagagccatctctccaacactacataccacacacaccaggttggttagattttgagactaacattagacaccaagatatgggtgccagaatgatacatgtcattttcttagcacttaggagtgcatgtttgtatacacagccacacacacacacacacacagtattaacatccgtatctagacatgtacatcataggaaggtaagcatgaattctcacagctgtcgcatgtttgagccagccacccacctccccaccccctgtctcagcattccctctccatctctcttcctttacctagtgtcttccaccagggacactcctgctttcacccactagtggtcattagtattgccctgtgagaaagcacttttaccaagtagagcatagtgtgtggctgctttcctgtttttttaacccctgtactttgctgttgaaacatcgttttccaaagatgtagatcacaacttcattttttctatactgcttagtagtcaaattcctcttttgaagtactcctgacggctccaacctccagttaatacttaaatgtatgtgtatcaaattcattctttatggctgctcctgtggattttgacatattgggtccttttcttttgctatgataaaacaccatgaccacagcaacttaaaagaaaaaaggtgtttgactgggtttacagtttcaaagggctggaattcatggtcattgaacaaatacatggtggcagaacagctgagaagtcaaaacccaagcaagaggcagacagggtacactggaaacgtgtttgttttttaacttcaaagccccacccccaacaaggccatacttccagttccaccgactggaacctagtattggaacataagaggcattgggagccattctcgttcacagcacagccatgtatgcattctcctacttcacagaaccgttcttctccttctcctaggagtccctgtgctgcccctagcagccaccacacctctcctttgctgtggttccctagggaatctacagtctaacttgtaggaaggacctggctgctttcccttagaggatagaatgcatgtaagattcattgctctaggagtccgctcatgttctttctacctaatgttttacttaatgggcattctacagttgttcaactgttcacacacacggaaggatgtcatggtcgctagcagaattttcaaatgaatgctagttttaattaagtaaatacctagaggtgtgaactcctggctctatagtaaacatatatatcccaccaagctgtttttcagaatagtcagctacacatagaaataatacaatttataatgaaggcatcaggctgagttagttatgtgttgggacttaattaatttttttctatttttattttatttaaattagaaacaatcttattttatatatcaatcccagttccctctccttcccatcctcccatgccccccaccagcccccaggccatccctcttctgctccatagaaagggtgaggccttctatgggggatcatcaaagtctgtcacatcatttggggcagggcctaggcccttcccagtgtgtctaggctgagagagtatccctccatggggaatggactcccagtgtccattcgtgcactaggtataaatgctgtttcattaccaggggccatagactgcccaggcctcctcactgacacccatgtgcagggggcctggttccctcatatgctgatttcccagctctggggtccatgaccttgttcaggtcagctatttctgtgggtttccccagcgtggtcttgacccctttgcacatcacattccagagttcagctcagtgtttagctgtgggtttccccagcgtggtcttgacccctttgcacatcacattccagagttcagctcagtgtttagtctgcctctgcttccatcagctactggatgaaggctctaggatggaatataaggtagacatcaatctcattattggggaagggcatttaaagtgcctctccactattgcttagattgttagttggggtcaaccttgtagatctctggacatttccctagtgccagaattctctttaaacctataatagctccttctattaaagtatctcttttcttgctctcctctatggactcaatctttctgctccttcatgtcttccccttttcttctccctcttctctttctcttaaccccactcccccatcccccaccccacccaccccctctgtgcttccaatttgctcaggagatctttgggacttatttaattagctttactgccctttgcaggaatatctaccactttcctcgcctgaacctaagtagctttcatgaataaatgcatagtttattatatggtctttgtccttgttgagcatcagaataactttttcatacatcatcaaaaattttagtgtcttagaggacagaagagtggagtttataagcttcctcgagctgttgtaccggaagccagaaataatacacttctttagtatttactctgtcaccccattctcaaacattctatctcaaaaacaaaatgcctgtgctactggtacgtttctctcctttttaggcaattttttctcaaaataacttctcttgtctttccctcctcccctcacactgccaccaaaaataagaaatttctgttgtcactgaagtttgacgggctgcttagtccagatctgctctcctttcatcttgcttcagttgtcagtagcactgggcgatggccctacatttaccgtcttatggatcatttcctccttggttttctcctcccctgcatctgcctttgtagagttttagctttcacaagctgctccccaccccagcccagtgcattcaggaactttcccccacctcccagtgctggtgatggaggacagggccttccttgcacatgacagacactctacctctgagctacctagtccaaacaatccgaactttcttttccctactatcccgtgccgggccacctctgcagctgaacctttttagttatcatgagacaggctcacaccaagttaaccaaactaactgatctgaaactaactcactttgtagcaaggcaaacctagaactctgaatcctgcctcaacctcccaagtaactggaattgcatgcctgcaccgcagagctttcttttccctctgtttctcttctatctgcccatattgccctacaatgtagtggggctttctgttgttgctgctgtttgtttttgagacagagcctcactgtgtaaccctggctagtctggaaataactgcatacaccaaactagtaaacccagaagtctgtctgtctctgctccttctgagtgctgggattaaaagaattaccactctaggatatggtgacacacagttttaatcccagcactgaggagacagaggcaagcagatctctgagttaaagaccagcctggtctacagagctagttccaggacaaccaagactacacaaagaaaccctgtctcaaaaaaaaaaaaaaaaaaactaaaaacaaacaaagaaccaaagggtccgccagcgaggtattttggaagaataagtccaataatcaactcagaattctccaggaacttcttgactcagaaaaagggcctccactactctactaagctcacctccgctcactctggctaccacactaataacccttctgcataaactgctcagctttcatacatgctctccctctatccagactccttcagtagatcccagttgggctttttttcttaccacttacatccattgaagagtcatcctgaccatcacagacagataagcaatttccctgtcacccacaacccatatctcaacttgccctgcttttctccatagcacttttcaccgaatacaaactatggttctttgtcttcccaatacaaaacatactgcttgaaagctagaatttgggtctgttcgctggtgtgtctgcaggaggctagagttgtctggtatacaataggcactgaaacactgggtaggttttagtcaggagacagagaggatctccatgagttagaggccagcctggtctccaaagtgagttcctggactatgcagggtaaccctgtgggggtggtgcttgaatactaattgatcttgatacacagggacatttgtggtgacctgccattgtaactaatttgaaccagctgcttgttaatcagtctgccagaattttataaaagaaaactttaccactaaagagacagcaagttctgactgtggttcttacccttcctaagaagtgtaactgcagcctttaatacagttcctcatgttgtggtgacccccaaacataacattattttcattgttgcaactgtgatttcactactgttatgaatggtaatgtaaagatctgataggggaccctgtcaagatccaagagaagcactggcttagcagataagagcacataacgttacagaggacccaagttcagttcacagctcctgcatcaggcagctcacaagtcacactgtaacttaagttccaagggagtccagtgcccccttctggcctcctcgggtacttgcacatactggttcatgctcaactaaaatcaaaattgagaggacaagatgtggaatatagtaaagaaacccagggtctttagctgcctcaagaaaatgaaccacttctaatggtaattgtttaaagatctatttttatatgagtcacaatctgtcaaaaatgaagttaggggactggagaggtggctgagataataaaccgcctaccccataaacatgaggaaccctggtacccagagtcaagcatgactctgtccataatcctagccaccccctgaccagcctgtctcaaaagctaaggtagaaagagatgaaactcaagtcatttgatggccaccagcctccaaatgcactccacccccatttatgtggatacccagatgaaagcaatttaagaaagggtttattttggcctatagttccagagggacagaggctatcatgacacagagagcaaggaaagaaagtatgtacgtcaggagctggaaactggttcatcattatatccacacacaagaaacagaatggaaagtgggtccaggctagggaacccccaagcccaccttcccaaacagcatcaccagctgggaaccaagtgttcaaacaatgagcctcctggggacaattcacattcagtcacacgcacactgcactaaactacaccataccacaccactcaccacactacaccacacataccataccacaccacaccacaaattggaaacctaagcactggtaagcattcccttctttcaggcactgctgcttcctgcgcctgttctgttaggggtctaagaaatgtagcctgtcaggaaaagaaagctcttaggaaactaacttagcagggctcaggcatctccagcactccccagactatgtatgccctgtgttttttgaagagagtatgttcaatgctgatcacaggcttctccaagagactatagccctgatggacacatccgaaacctgggggacctgttcaaacatcaaacactcacccttcaaaatcattctcaaagaaaaatacttggggccaggtgtgtttgtgcacgactttaatcccagcacttgagaggtagaggcaggtggatccctgagttgaggccagcctgggctacagagcaagttccaggacagcctccaaagctacagagaaaccctttctcaaaagagaaaaataaaaaaaatggaagaagaatgagtattttgttaagcaatgcttgtttaagactgggtgggtatacaaaggcaactccaagaggttgttgaggttagatgaactatctagttttgtgaagagattggttaacacagaacttaaattacctgtcctgatggaagtgggaggctagaaactccattatttacagtgaatgctgacagctggctgtgtgtcttgcttcttgcccacagtgagttccatgggaaacggcacgagtaggctctacagtgctctcaccaagacactcaacaacagtgcagccgctcagcacccggagtatttggtgtcagctgacccagaacatctggaacccatcgatcctaaggagcttctcgaggaatgcagagctgttctacatactcggccaccccgataccagagggattttgtggacctaagaagagattgccccagtagccaccctcccattagagtcatgcagtggaacatccttgcccaaggtatgcctgagccgtttagtctgctgtggcttccttactgttcctgtgcaccccagtgcgcctgtgtgctatggggaggacagagagaggtgtctttcagcagctccgtgggataacagacctccctcgtggactcctatgggaaggatagtggtgtctttccgcagtgggataaccttagaccttctgttgccagcagcttgagccacagctctgtgacagcactggcagggaacgaactgagtgggtggtgtggatatgtgtggagcagggttgagactagccttggctggccttggcggcccactgggacttataatcctgcactcaaggctgcaggagcattatgactgccagagtttgaggccaacttgagctatggagtaaggccttgtctcaaaacagtaaaaccagacactgcttggccaactcctagcacttagttacttaaaattattggtggcaggaaaggccccttttactacacctgctgaattatgaactacatttctcaatcattctcacgtgttaatacctttatgtgtagttgaagttgtaaggaaaggcagctgtctttgggagtgaagggataggtcagtggttaagagcaggtactgcttgtccagagttcctgagtttgattcccagtacccacaccaggtggttccaggagacctaacacctctggcctctgcaggcacctgcacttatgtacatattcctgttatccgtacacatagttaaacattataaaaaatttattcatttttttaaactacttttaagggctggagagatggctcagcggttaagagcactggctgctcttccagaggttgaggtcctgagctcagttcccagcaaccatctgtaatgagatctgatgctctcttctggcctgcaggcatacatgcagacagaacactgtatacataataaataaataaatcttaaaaaaaaaaaaaactacttttaaaaagaaacggcatttcatgtttatgtatctctgacttaccaatcttgttagaagtatttttatttgttctttgacaatttcctatatatgccatgtatgttgtttatacccacccccttccacccttacctgccctggcacctgtacaaacgtgcccacccccatctttgagtctatttccctggtgctcgttcataaggagaaaaagatatttgtctcattcattctgaatagtatctatttttatccgttcacatggctttattatcatcagtgttaaaactaatgttatttaaattgacacacttttctatccccaggactacaaggtttctctaaacttaaaaggcaaaggtctcaatcctagaatatagttatatgaaatagttttagtatatattggggaaaaaaaaaaaaaaaaacctgctgcttgcttcagcacatagtatgaggttattttgtctgggtaggttaacacagcatggacctcccatccgtgagctttgttcatttatgagacaggggcttagtatgcagcctaagctgggctggcactcagtaacatagcccacagtggcctcaaactcatggagatctgccttcccagtactgcatcaccacatcaggcttcccattttctttgaggtcatgatactgtggtaattgacagatgcttggcttttcttttcagctcttggagaaggcaaagacaactttgtgcagtgccctgttgaagcactcaagtgggaagaaagaaaatgccttattctggaggaaatcttggcctaccaaccagatatattgtgcctccaagaagtggaccactattttgacaccttccaaccactcctcagtagactgggctaccaaggcacattttttcccaagccctggtccccgtgtctcgatgttgaacacaacaatggaccagatggctgtgctttgttttttctccaaaaccgtttcaagctcatcagcagcaccaatattaggctgacagccatgaccctaaaaaccaatcaggttgccatcgcacagaccctggagtgcaaggaatccggccgacaattctgcgttgctgttacccacttaaaagcccgctctggctgggagcggtttcgatcagctcagggctgcgaccttcttcagaacctgcaggacatcacacaggaagccaagattcccttgattgtctgtggggacttcaacgcagagccaactgaagaggtctacaaacactttgcttcctccagcctcaatctcaatagcgcctacaagctgctgagtcctgatggacagtcggagcctccgtacacgacctggaagatccggacctcaggggagtgtcgccacaccctggattacatctggtactccagacatgctctgagtgtcacatctgctctggatctgctcactgaagaacagattgggcccaaccggctcccgtcctttcattatccttcagaccacctgtcactggtgtgtgacttcagctttaatgaggagcctaatgaacttttataaacactgtcattttaatcatgagagtcttaaccagggatgttttgggaaactgaagtatgataagaagttgcctgaaaaaggacacccagtttctgccacttcactctccatcattttccagcatgccttggaaaagaatttgttcacaaacctttccaattaaaacctgcagcaaaaagggtacttgcactccactttgggcttgtattgttgattttccataccattctccattctcatttaagggcattaaattagacttacttggaagttgtttttgtttttttgtgtttttaagttgagggtgctataaaactcagtttgtaagcccctcagaaataaagtatgatataggaagttttctagacaacatttcaagttatttgtgggatttttaaatgtcagcaagaaatgcatggcaatatttattttttatatcttcatgtaaaattaaatggattatatagcattttaggtaacttagcacctggcaggaataggcataatttccttaaaatttcaaattgtttttatttggtgatctaacagaatgtacattaaggaactatattttatagctctgaggcatttgtgactttaataagtacattattcacagataatcgctgctgtttgctatgcctccaacttatctgttgtgtttcctgaagaaattccagttcgttttcaactaaatagttttcgctatttagtcattgttaaatatttgtacttttttgttgtacatgtgatgattactccatgacttcttttggaatgtgctttttacaagtagctttaggaacagtggctaagaatagtagtaaaaattccttctgagatgaggactccagaaatcctattgagcagccaggtgtgatcaaaatctgtgtgttggaggccagcttagcctgtatatgaagacccattctcagaaaaatcccaaagacagccagatgactgggttcaaaatttctcagagaatttaagagtagaaatgataacctagagttctcttcgaattgctgaagcctgttcaaaaaaagtaaaaacaaaaataacccactggtggtaaaatggtaaatgttttattgtatgagttctaaatattatttaagattaataaatagacttataacagagtgcttttagtcttgggttttgtttttgttttttttcttttttcagtccaaaaggaagtcaatttggatcttgtggttcaaacagtatccatttccacactgaattttcattttgacacttaacagaagtagctacacattcaagcttctgggtatcttagtaaaaggatggagtcctccacatggcttactcctgcattctacctccaggtccataaatgatatagtggtcaggttagtctcctagagtgcttcagatgtttggaggcttgatgtaaacacactgatactcaccaagggccaacagcactttactacaaggcccgaattcatggtctctgaagttcctatagaatgtgataggcgttggttatgggacacagtcaagtcacaaccatagagcacttggtataactgaagtttaaagcagtttaggagctggagggtaactcagataaggctccaggatgatccccagcaccaggaaagacaaccaaccaactagccagcaggacatggttgtgccctgggaaagtagaggtaggaggtcattctcaactataaagcaagtgcaaggccagcctaggatatggaaaccctgtttcaaaagccaaagtaagtagttgttcaacagagatttgcactgtcagaggctcagccactagtaatgtccttgtgccctaccccttactgtctttggcctatttgctttatcctccttcccttaacaccacctttcttgagacgatcttgctttttgcccaggctggcttggtacttccagtgtagccgaaggtgagaagtttgcaggtctctttgtcccaatgaagttacttcatcttcctgactaagaacacttgttctttctagttactcttcgcaacctgcctcagaattttccagtccttggcctcactcaaggagacctttctccacctgactaaggtggttcaagcctacttcaggggatttttgttttgatgtttcttaattccagcccaataaataagaaaacaggtggaggagatgccatggatagaatagcatagtgagaaaatgtgtgcctggaatagttgggacactagcaaagaaatgggcttgggtaggtgggcatttcaagtaagatgccattgaatttaaagcagtaacacaaatggtgtaatgaaattcacattttccttattttggctttttggcccagttttagcccaggctgacctcaactctagcttcctgaaatcttccagaggctggggaaaaaggatgatgagttttctgaaaccctaaaccacatagaccttatcagaggtaagacatacaagataccatcaatagaagtagaaaataactacataataatggagtgacacggcatctgagacagcctacagacccctggtaggtgttatagcctattagcactaaagggaacagaatttaatccagcactcaagaagaactgtgatgggcaattaaaatgatctaagatttagactcaaaatctagaccaagatgtggtagaaataacatggcagctatctaaagaacagctgttataatgaaatccctttaaacatctgcttgtacatcagacactaactccttccaacctctgttggaaatccaaaaacatttaggctgagaataagccaagcatgtcatggaaaaccaaaatggctttgagaagcaaactaaggcacaagatgagatgggcaagaggaggttgaagtaaggggctagacagaaagctcacaggtttaagagcatttgctgcttctgcagaggagtcaggttttgattttttttttttcctttgttttgtttattgtgaatacaacattctgcctccatatatgcctgcacaccagaagagggcaccagatctcagaaggctcagaggttaagagcactggctgctcttccagaagaccggagttcaattcctagcaaccacatggtggctcacaaccttctataatgagatctggtgtcctcttctggccggcaggaagaacactatacataataagtaaataaatcttaaaagaaatggagaaattctgaatgacagctgttgtttggaccaaggatgtgtgagtggaaagcgatgcttatgaacaggaggcagctccttcctgaatcagacaaggatgtctgctgaggtgagatcctctgtaacaaagggtccagccaaggggattctgtagatgtctcttgatgatgtggagagaagtggtcactgaaggctagaactgctactggagtggatctaaggattaaacacaagctgtttgttcatcacagtgcaaaggctggagactctggaagacgcagtgacatcaagccattgtttttgtagcttttctctggaaatgctggacacaacgtgtaacctcattatattgacttactgttctcaaagaatgagtttgcaagtttagattttagatgtttacctgaaactttttctattgcttttagaataaaacacagaaaaaagtatgttacaattgagctgttaaagactcttagcaaaggtaaccaaaatctgtatatgctctgtgtgggtcaggattggatgcagttatgtacagccttttgaaaaatgagttttatggaagatctgaccaaaaattaactgtacagtattgattttgaaagatgaaatacttagggtagattttgaggttaactctcaatgggaaaaggaatcagcctagactcttactttttttttttttttttttggtttttcaagacagggtttctctgcgtagctttggagcctatactggcactcgctctggggaccaggatggccttgaactcacagatctgcctgcctctgcctcccaagtgctgggattaaaggcgtgcgccaccaacgcccagctagactcttacttttaaaagtaccattagataagtttgtggggtagaaaagagatgtagccaggagagatggcttagcaggtaagagtgctggctgctcttccagaggaccagattcaaaacccaaaggtcagctcacaaccacctagagctccagttgcaagtgaattggacacacacttctggcctcctggggcaccagtacagtgttaagtgtataaagccatacatgcagacaaaacacccacacacatatttttttttatcaatttagttttttttttttaaaaaaaaaaggttagaaagggaactttataaaaaatctttgctgatataagtagcatcgtgttagatatacaaaggccaaaaaatattaaacagttcatctaaatttctaaaaagatagacctagttatgtatgacagtaaggagtttgtgtgattctctggtgcctcagccttcaactgtaaaggctggacttactttctacccataaaaaggtctgatggagaaacaaatggtatgactgaaaatgactctgtgtatgtgaggtgccatgagaaacccaggaacttgcaaatgccaggcaagcagcctaccactagtgctgaaagtgcttccattaagtatggccaactaaaacactacatttgttaagtaggcaattatagttataaaggaaatgggggtgtgtgcaggtagttaccaaatactagtataatgggacaaaaccagagtagcatttcttcatgtagtaattaagaaaacaccagacttctatttgttacctaaaacgacaccctatactggctttagagtgttgtaaaatatcaccagagaccaaaccacaagataaatttcacttctatatttcagaaaacctacttgaatacactttgaaacaagagtacaacaaaatagaatatacttcaaatgttgaatatacaaactattatagttcaaatctgaacactggtactttccctcttaaatgtcaactaaaaaagaaaaagagaaaaaaggaggaaagaaggagaaagaagaaaaaagaatgagaaagaaaacaaacaccaggtattagagctacctgacgagttcatgctgagtctgaatttcaaaatgacaggagaactgatactcatgtgtctgcaagacgccagggctgacttgagcgacgcaggtatgttacagtaaagggccagagccaacagttaatttcttcacaattaagaaaccaacagacttaaactaccatataaaatgttacatgtaaattctataacaatactgtgctaggtacaagatttttaaaattttttcctttaataaaaaagctttacacaaacaagccattagcttatttcaagaaagaaaaccgaaaattagtctaaggcctttgttttaaaacagcttaagctatatgatatatatattcaaaacaaaaataaaacaagaaaacacactagatctttttgctatcctcttctggagcttttggatccactcagttcacattctagaatacctatattagcagagtcttcacatagcaccagttaagtgagtactgtgcaaacacagtaataattgctggtatgcatataaaatgcatcaaaaattgctatatgtaacaatgagatcacccatcccaatcccgccccactgaaaactatgtaacctcttacaggtgttagtgttccaactcttagtgtaacttgatattgtagtgggctgcttggtccctttcagtcttttttcttgagggttcagtcgttcctagtctaagaggcagttttctgtcagcatctcaatgtatagttcacttcccactgaaacatgggataggtaattatttccagtaagtctgattgctttcttatatgcacagctgttttaaagtcctctggcttttcttgatgacttcccttgcagatgtttgtcagcacaacactaacagtctgaagtccatggcagagcctgtttatttctcacatgtcactagtccttcggttttcatagtcacaggaagggcaatagcagaaggtgcactgacaaccactacatgggttactgtcttattcccgtctgctcccttttcttctaccagctgcaaagttttcacatcatgttcctgcttttttgccactgcttctgatttaacctctggccctttaataaccgcactgataactcgaggaggagtctggccagaagcctgttgagcaggcacagatagtctcattacaggagtaccgtgggctattgaaacgggggtaagtgctctcacagccaagggggttccaacaatgttaatgcttcctgatccagtcagattggactttgtctgcagctgacactgtgcaagctgtgtagcagggatggtgataattttggcaggctgcatggtgattttgtctccattttcagcagaggctggcaccacagtcgggatcgtctgaatgacgacttttggagaggtggctgtagttggactggtgctggttattaatggtgcacctgcattgactgactgaactgccacagttgaaatcttctgacccagtgatgtcattaccacaggaacttgcattgccacacgaactgtcctggtagataaaaaacaaagaagttggttatattcaatactaaataagaaaatgagtttcatgttaaaaagtaaatacaaatacaaatgtataaaaccagtgccaccaactttgacagttgtagtgaagctgagaagaaaaatctcctgctccctactggggtttggacctggtgtctcttgcatgcttatcaagtgccctaccactgagctgcatccccaactttttgaagcagggtcttgttaactcactgctagcttagaactcactctgtagcacaggcaggccttgaacttgcaattctcctgtctcagcctccacagtacttaggactacagatgtgttctactatgtatagataaaagtatatttcaaaaaaactctagcactttaaaaaaattttcaatttttatgtgcactggtattttgcctagatctgtatctgtgtgagggtgttggatcctctggaagtggagttacagtcttgagctgccatgtgggttctgggaactgaaccctggtcctctggaagagcagccaatgctcttaactgctgagccatcattccagccccaaaatgaatttttgaaagtcatcatacaatgttggctaatattgactgaacaaggacagttcatttgttccaaggagcatttaaaaacaaaacactgtgtgacagttaaccacctccctcaccttggagctgctgctgctggcacagatgctgtggtggtaggagacctggatgaagcatcatgagcaggggaagtgatattcacaactctagccacacccttctctgctctggagcagtttacagatgagttttttccaccacgaacagaagtcgctgctttgaggaggctttctgcagacaatgacactcgttctaatgacttttcatcagcggctgctgccaagtcttcactgcaggtttcacttttgtcatcatcaatgaccactatgtttttgggcatatccttgaactgatatacaagcctctgtccttcaacctttgcaagaatccccctttggtagtagtatctgtgaagggaaaaatgacttagtcaattttctagcgacttccagattaaaaaaacacaaagcaaacactgacagacatttacttattcctgtagatgagtggcccttctgcttggacaactcggaagattataaatttggtgaggaagtgaggttggtgtgtcgtgccacgggccagtggtggttaatgctgactgtcaatttgacaagatctagaagcgtgtaggagctaacttgctgggtttatctagattagattagctaaagtgggaagacccaacatcactgtggggcggcaccatcacaggacgcagtaagtagcagcattcatctgtggcctggctgcggatgtgatgtgatgcctaccgctatgaattctccacccttcctagagtactgtgtcacaccaatgagaaggagctaatgcagctctgtaaccctgacgtgtacaaagaagttgcggcactgaggactgaacctagagactcactactaagaggaaaggctctattacccagcttttcacccagctttatctccagcaccccaccacctctatatagaccaggctagtttccaatactagactgatcctttttatccccacctcccaagtaataagatcacagtatgtctgccatgtacatcttgttctctctttttttttgaaaaaaaaaaaaaaaaaaagattgtatctattatgtatacagtcttctgcctgaatgccagcagagagcaccagatcttattcaaggtggttgtgagccaccatgtggttgccaggaattgaactcaggacctctggaagaacactcagtgctcttaactgctgagccatctctccagcacccaccttgttctctctttagaaaagcttagcctaaacccaggacactttattgacaccacaaagaactctgttacacaacaaataatctgtctttatttggaaagccacctcacccatgtttagcagagatgcaatctgtggaatatgtgaacagtgttacataaaacacaatgtaggagtggcttatgcctgaaatcccagtattgggaaactaaggtaggaaaattgatgcaagttcaaagccagcttgattatataagctccaggccagcccgggctacataccaagacctttctcaaataagtactataatgtatacattggagagttaatggatttttcatactgaccaaacacaacaaaaatttttcattatcaagacagtcatttacaacatttgcagtaactaaaagcaaattaatgttggaaaatgcatttcatttagggtttcttataggatctcactctagcccaggatggcttcaaacttcctctgtaaaggcagatgactttgaactcttattttcctgtcttcggttgccaagcagtagtactgcaaagcatataccagtacatccagtctgggtttaatgttttaaaaggcttacaatgtaacaatttctattacagaactgtcctaaatgcaataaatatggatcttctaatattgaaattttatgcacgtaaaccaaacttctctttccctgtctatttccaaatctaagaaattcttatagattgttcacccaactttaacaactagcagacagtctaaagagacatgtaagttctatttaaaaactagtccatgttcgttcttacctcaaagctcgccccatagtttcatagttcatatctggtttgttcttatgctttccccaaagctttgagacagcctttgagtccacaagtttgaatatgcccttttctctctgagtccatttaatatacctgggacacgtatttttatcttgaagtagatctaagagaaactcccacagataggttgtgtttccttttaaaacaaagcaaaaacaatggtaggcattaatttattatccattaatatgattacttgcaagtaaaatatccttctttgctgcttctttttgagacaaggtctcattatgcagccctgctgtacctcaaacttgtatgtagaccaagctactcttaaattcaaggccactgcctcccaaatgctaggattaaagacctgcaccatgcctagactacatgcctgttcttacaaatctatgcttttctacaaggaagccgatagaggccctagattctatactgtcatgtgtcctgtatacaaggcttcaggttcagtaaaggcaacagcataatatttagtgtaatacattgctcacctggattacacagaatcaactttcttaacttataggcatttaaactctgaatataataatctggatatataatctggatatgtttgatattctcccccaagtcccttaaaactcatcagaagtcactagcctcttctttaaagtggctctacatgaggataagtgctattaaacaaatgtcccctaaacagtggtccccaaaaacaatatggtttgcactgtcctactatagactatcccatctcttcaagacatagtttttttttttttaaagattttatttatttattatgtatacaacattctgcttccatgtatatctgcacaccagaagaaggcaccagatcgctctacagatggttgtgagccaccatgtggttgctgggaattgaactcaggacctctggaagagcagtcggtgctcttaacctctgagccatctctccagccccaaaacataggttttgtttttattttgttttgttttttcctgagacagggtttttctttgaagccagtcctggaactcactctgtagactaggctttgcctcgaactcagagattcacctgtctctgcttccctcaggctggaattaaaggcgtctgccattaccgcccagggagacactggtattttgatcaaagtttcccataatgttggcccacccttgattaagaaatactgaaatggtactcccatatgcctgtctactagaaataacccttcttacaattgcaaaaatgtcacacacacaaaagtatcttacttgcaaaacaaccctccacaaattaccttttccttctctggctttcttcttgattcctaactcaggagacccattggaaactggtgactgctgggtctttggttttcggccaactgaaaaaaataagacaacgaaatcattaactgaaaacagatataaataccagactctctaaaacacttctgaaattttaaataaaacggttggtagaagcttgactttacaaagtcagtaatttctctaacttccactatatagtcagataagcctcaatctgctacattttctgactgctgtcctagagctcacaatgtagaccaggctggcctctagctcagatactactgcctttgcatccaagtccagggaccaaaaaggtgtaccactacactcagctgttagacaagttttttagtatggtatttttattaattcttgaagaactttatacattcatagaaagtataatttgctcatactctccctcgattcacctatgtacagcagaggatctgatcatgtgaagctctgtgagctcaaatgaacaaaacgtgaaacatcacttccattgtgagccaggaagttgaccagccaattttaagctaaagtgttaacttgtcaaccaaaaatgctgaaaataaaacacactcctacaaatgactatgcatgtcctgagtattgagattacaagtatgtcaccttacactgtctactgcattttgttttcttcaatgttgattccctaagagaaaacatggtgtttgttttcctaagtctagttgttttgcttggttccacccattttcctgcaaacctgactcctttttcagagctaaattgaaatgtgcacacacacatacactgtggtagcttgaatgtttaattggccctccatatgtatggagtgtcattatcaggaggtgtggccttgttggaggaagggtgtcaccttgggggcaggctttgagatttcctatgttcaagataccacccattgtctgagactacttcctgttgctttctaatcaagatgaagacagcaccatgtctgtctgcatgttgccatgaaccctgccatgataatggactgaaccacagaactgtaagcagccacatcaattcaatgtttttctttgttgccgttagccaggcagtggtggcacacagctttaatcccagcacccaggaagcagaggcaggtgagttcaaggccagcctggtctacaagaactagttccaggacagctaaggctacccagagaaaccctctcttggaaaaaaaaagaaaagaaagagctgccatggccacagtgtctcttcactgttgttgaatagacgatttgtttaactatgtaaatatgtgttgcatttgttcatgtgcatttgcttaactatgtaaagatgtgttgctgtttcaccttgcctgcctaaggcacctgatggttctaataaaatgctgaatggccaatagctaggtagaggaaggggaggcatggctgctgagcagaaagaaaaggggagacagccagacacagagtatgcaggaaagcaggacaggacagacagtataaggataaggtaaacgagattccgggcagcacatagcttagtataaatgggttaagttaaaaaaaatgacagaactaacattcattatatattatatgctgacttaacattcctccatgtatatatgactggtatagtggatcatatcataaattctatttacaactttgaggagtctgtaatttacattactaccaaaggtgtgcaagtgtttaattcccctacccaccatggcccattcagatggtgtttttgttgtttttaattgcatttatttgtgtgtgtgcctccaacaaagtgttatatatgcacgtggacatcagaacaatttgtgggagtcaatcttttccctctaccctgaggaccccacggacagaactcaggttatgaggcttgctggtaagcccctttacatgctgaggcatcacaccaatccttgtctttttcttttctttctttttttttttttttttttttccctgttttggtttttcaacacacggtttccctgtgtagccctggctgtcctacaactcactatgtagaccaggttggcctcaaacccagagacccacctgcctctgcctctcattaaaggcatgcggcaccactgccctacttggttttttgttttgttttggagacgggtctctctctgtagctctggttgtcctggaactcacactatagatcaggctggccaccaccacctggtggtggttttcattgtttaaaaatagacctcaggctggcctggcaactcaacttccagcagtcctatcttagcctcctatgtgctaggatcacaggcatggacaccacgcccactcagttgtcttgatgaagattagacttcattcattttttttaagattttatttatttattatgtatacaatattctgcttccatgtatatctgcacaccagaagagggcaccagatctctctacagatggttgtgagccacatgtggttgctgggaattgaatttaggacctctggaagagcagtcagtgctcttaacctctgagccatctctccaaccctatgacaaagttttttagtgggtagtgaacaatagaatatgctgtagtggaaggcactgtgttatttcaccataaaatgcaaacaaagaataaagaaattacaattacacatttcccaccatgacagactcttttccctctgaagttgtaagccaaataaaccattccttctacaagctgccctggtcgtggggatatttaattccagcacttgagaggcagagaatgctgggtatctgtgagttcaaggccagcatggtctacagagctagttccaggacagctagggctgttacatagagaaaccctgtctccaaaagaaaaggaaaaagaaagaaaaaaattaaagaaaaccacccaaatcaaatttaacccttgatttgaatagtaaaggaggaatgcattgtattcccatgtccttgtgttgtggcaggtgtgctggccccctatgctttacccactactaggtttatactgagaatcttagaggtttgtgtttgcttgtttaatgtatacagatgttttgtctgaatgtatgtctgtgtaccactttgcatgtctgctacccagaagaggtcatcaaaacccatgaaactggagttaaaggcagttgtacatcagataccctggtaacagatttgtagacagctatggactgtcatgtgagtgctgggaaaataattcaaatatctagaaagcgccaggtggtagtggcacatgcctttaatcccagcactcaggagtaaaaccagggctgttacacagagaaaccctatctcaaaaacgggaggaaaaaaaaaaaaaaaaaaacactaaaaaacaagtttgaatataacaagaaagttcctccaaagagtttacaatctggaagaaagataatctgaaggactttgcacatatgtatgtatcgctgtgatgtgtatatgtatgtatacatacacagcaattgggggaattatatacacgtgtgtgtgtgtgtgtgtgtgtgtgtgtgtgtgtgtgtgtgtatgtatgtatcagcagcaattggggtatcttaggacagctgatcccctgcttcagtctccaattagtggtgattatagatcagcatcaccaggactggctacaaatgtctttgaacaacattaatatttttttaagattttatttatttattatttattatggatacaatcttctgcctgcatgccagcagaaggcaccagatctaattcaaggtagttgtgagccaccatgtggttgctgggaattgaactcaggacctctggaaggacagtcagtgctcttaaccgctgagccatctctccagcccacaatattaatattaaagtacaatcttagcaactcaatttgttctgtttctgagtctagttaagataacattaatctgcaaggagtggtggcacacacaacttcagccccaatactcagaacgcagagacaggcagatctctgtgaattcaagaccagcctggtctacagagtgagttccatgatagccagggctaaacagtgaaaccctgtcttgaaaacaaaacaaaacaaaaaaagatttctcatatctgataagtatactcaaccttttttctttttcgttggttcgtggctatctggtgaagtgggaataggcgaggcatccattggctcagactcttccgttgacacctccactacagtctctgtaatgacatctggcctcatcgcagcatggataaactctggagttgatatacaaggagggacaaacacttccactataaaaaaaagttgaaaaattaaaatttcccacccctattacactttcctatgtggacagttcaatatttcgaagaggcaaggtttactgaagaattattcaaaggaaggtgagaacttctgcccgaagaaatccacttactgaatatccaaaactatctaaaatacacaagtgaaagacaatcattttggcagtaatgaagtcaacctctttttcatacctttaggcactttttaaagatttatttttattttatgtgtatgtatgttttgctggcatgtttgtgcacttgagtgtctattgcctccaaaagccagaagagggcatcatatcctctagatttggagttaccctgtgagtgtgaaaaccaaacccaggtcttctgcaagagtacacagtgctcttaacccctgggtcatctctccaattccatttcaacttttaattttatattattttaatagagaaaatctaacaaaatggtcctttaataattactttcattgcacatatctattactattcattaactgggaaatacaaggacaagatagaaaattttaaaaattataaatgctaggcagtggtggtacacacctttaatcccagcactcaggaggcagaggcaggtgtgtctctctgaattctaggccagcccagtctacagagtgagttccaggacagccaggactatttcacagagaaaccctgtctcaaaagaccagacaggtaggtagatagtcactaaaatagtacatacagattgctatctggtattctattacatacaataatgttgcttcaacttccaggataccacatttctatttcaaatttggagatccagatactgtatgcttacatgcattaatatgctaccaacaaagccactgtttacttctcatatccatgaagaatgcagtgaatttcttaatccaatttttaatgattttggctggcttcaggaatgaaaaaatgtttaagagcactggctgccctttcaggactggaatataattcccagcatccaatggccgctcacaaccctctgtaacccgctctggcacccatgggcatcaggcatgcacacggtgcagacatgaatgcaggcaaacacccatacacataaaatacccttttaaagatagctgctgttagcaactaactgtaaattcctgcacaacgaattaataaaattagaacagaatcaaattagtataacaccactattaaaatcaacctaaaaggaaaaaaggaaccttatttcacaatctaaaaggaatatgaagcaaattcctttccctctctaccattgccaggtccatgttgttactggctgttgatcaatgaatgggtaaaagactgaaagagctataggaagcaaatggtccaacttgtgcaactcttaaagattacaactactaccttacaatttatccagaaccaagcaaataaacatgataacatacacaactgtctaatagaaaattgtgggcatttctgcattatttattaggacattaagtacagtatttaagattttagaacctttaacatcagttactgatatcaggtgtttatgtatagatctttaagaactccaggaatacctcctttgcagtaaagtcttcattctaataggaaacaatgtgacatttaatttaaaaatgtacagatcacataccaggacttcttgactccctcaagcaggtaggagattccatatgaagcagggcttcagcagcttcaattgtcttatccgtacagtgtgcattactgctatgaactgatgcttccactgtggaaaaaaagaaagttctttattaaaaatgaaaacactaacaacttattactgaattataaacaattctatataaaccaatgactacccattcattaactacttactaaagtaataaataataaagctaatgtctacacactgtaaagtgaatgtttattttaaaaacaaccaatgaagatgggcgttggtagcacacatctttaatcccagcactcaggaagcagaggcagggggatctctgtgagttcgaggccagcctggtctacagagagagtgccaggacaggttccgaaggtctgggcagggaatggatttgaggatatcctgggctacatataggcagactctatctcaaagccaaaaacccaacgacgctaattaaaaattagtgagaagttcctggatcttaaccaaaagaaaacaaagaacaaaccttgaaatataaaatttgcatccatttttagtccaaattggattgagataatcacccaaaagggtttggaaacaggaagaaaacgaccccataggtcaattatgtaatctgatgtattgtcacaaaactgggggcaatataatagccaacagaaatcagctagaaacattttttctaagctagcctaatgaattgcttcaatttttatattgtgtcctgtgagtggacactctccaggcaaggcattaattttactgtcacaacatttcataacttgtttcacaataaccttgttcttttcagaatttcaggggacttcactaggtttttctaaaagaaatgtacatacgtggatggatgaacagatggatgatcttacctgaaagccattcctgattcaactgctcttcctatctatctctcttacacatctttcatgcttttctatcaaatggtttgtcaaacagtgaagtattcaagcagaggtttgcactttcaggtctaacagcttaggttcttagactcagccactaagacaatccacttaagtctctgatgcctcagtttccattttatagagcaggacgatttctacaaatagttgtggaaaacacatacagtgtctggcatgaaatgggagttcagtatgatgacttctcattcctgtaaaatcataagctttgcattcaaaacaggttttgtttagttttgagatgttgaggatcaagcccagcacctcccacattgctaggcaagtgctccacctctaagcagtgtatgtagccctagatttttcaaagaatacatgcatttcttttatgtagcaaattaaagacaatcccatgatcttataaaagaattgccaaagaactcattatcttagtcatacatttatttcacactgacttatttgtatactgaacaatttatgtgattagaggttctgaaacataaataacagattttaatttgactgtttttctgaagatgttctccttaaggagctttgtgaatgttcacacagattcaaaaggccacgccaaattcacaagtacagacatgatcttctaaagcctgtctcaagaaactttaattgtaaaagaatcagttagaaccttcaaattcgccaaatgctaaaaccgcagccttctaaaacaaagtcatttggggagcatttgttttaaaacttcaagcctgttttagcacctgttacacaccgtccacactctcaaggcaaggtactctggtctctccagctgctctttccatttatggaaatctgctctaagctaatggacccggagaggcagccaaacctctaagtaattctatctttaggtgaccctgcttactcttatctgcagctccagtgaggcaaaggattcacccagcgtctagttcagctttaaaaacttagtagtaagtatagaggacaccgcccattcttgagtatggtcttcacagagccctataagactcacacacaataacaactctcagaaagcaaatcctcaggttttaaacatcaaaccaagagccatgtctttatagcgttgtaatttagctgttgtcttaggtgctattaataaactatcctgggtaagcgaattccttatgtaacattatgaagatatactctaaaaacggtacagtactacagttatagtttcaagtatttaacaaccatagggcaataaaattacatattttaaaatatttaagttataaacaataacaaccacaaaaatacttgcctaacagttatatattgtgttccctaaattcttaaatagcataaggtgcattttcaaaaccattatttcaaattagtacaaattaatcctgattctgttctggtctggtttgttctagaggtggagtctcatgtagcttaggctggcctggaactctagacatggcagtaatcttgaacgcccaatcctcctgcctgtgctccctaagcgctgagattacagtgttctaccacattccaattagtcttttaaagtgcattttcttgcttctacttctgacctcaagcttctcttctccccccaaaatcaacaaattataaccccaaaataatttactagtactttaaatatccataattttaagttgccaaatagaaaacccaacgttttaagtacagtcaggctgtgtcagtcgaatgtttctcatgtgcccagtgctgtgcttcagaaccaagttttgtgctgaacagggcttctgcctcctgcaacttcacattcagagtgccatcaaaacccaattgtaaatgtaaaacaatcacattactctgtaatctaccagcttgctaaagagagcagtgctttttactttaggagcttagtttgtctgcaactcaatgctaaacataaataaaaatctaaaagcctagcgtccaatgagaagttccagaatattttactcaatttataaagtatctatactttataaggagtatctatactttgttgacctaagtcaacaggtgatttttctaaaacaatctttgatagcagaaatttacagattgttgtgagccaccatgtagttgcttggaattgaactcaggacctctgaaagagcaggcagtgttcttaaccgctgagccatctctagcccatagcagaaatttcatacctctccatttctgtaattttgaaaatttcaatgatgttttattcagttttattataattatttataaataattcttaaattatttataatttaagaaattaaaactgcatatttctaaagatataaatatcaatttaacagggccttgcaacctaaaagcaacatctgcaaataaaattccttcttactactttccagacaagaatgaaatttatggtagaaaatccgcaactcagtttaaaaacagaaacaaactagtaagtaactggacaggtctcatttttctatcagttgaactcctagccaagcctctgtgaagtaatgtctcaaatacatttcaaagtgattgaattcttatcaaaacaccatcaataaatgtggtttgtgctgccatttactgtgggtaaatatgccggctccatctccatctctaatcagctggtgtttgtagtacactgctccagactcttaacagctgttacaaaataccaaacttggtaattaagtctgacaagaggcatacctcccagctttgcataagagaacgctggcaatggatctagttcataacaatgttctcaagtcagaaataaactttacaagcaatagagtttgagagcaatggaaaaatgagaaatacttcagtaggtgttagtggttttctcctaaacacagcgccataaactagtatttccaaggtcactactcaaccttgcactgaccgaccacattctctaatgtcccagagctctagtggggacagagcagaccactgcaatgaagaagagggtctattatcgttcaccattaacatctgtctcccttgaccttcaatcaatatagctctgtaagtacaaaaagacaattaaaattactttctaagccaaagttatccaattaaattaaggccataatttgaaattttctcatacccacattttaaaaagcacaaaattggtattaataccttttggggagggcatatccactaagctacaatctgaaattaataccttttgtttaacctaatattgtcatgtcagcatgtaattgtaataaatataaagaacttttaaaattcaactttccagccagatctcaagtactctatacctacaggtggctagtggctattacaccaaatgacaacctaaagccattcttaaacttaactttggtcagaagacacttctgcattcaaattactgagaatctcaaaaagacttttgagaataaaccttatctacagatagttattgtatttgaaaaataaaatttagccaggcatagttacttcacgcttgaaactccaacatttaggagttttagtgtagccagcctaggctagcacaataaacaaacttttaacctcaaaaagatttatttacccatttacaatatacatggtacttagatatgcataattatgaaaaacaaaataatcttaagtagctttacaagtaagtgtatgttatgtataaatgattgcatgtattgggtatgtatgtatatatgtatgtaggtatgtatgtatgtatatatgtatgtatgtatgtatatatgtaggtatgtatgtatgtatgtatgtatgtatgtatgtatgtatgtatgtattagaggcaggggttcatgaagaattgaacccagggcctcatatgctaggcttctactaatctatatcctttattttgtttaattttatttcagaaggggtgtcatttgtttgcccaggttagctttgatttcattccctagcctatataagccatgagcttggaataaccctgtctcggtctccagagtagctggggttacaaacctgtgccactaagtccagcctgctttatattttctgggaatcttttttaaatctttattttgtttctgtacactctggaaagcctcccggaatctctagatcagtgtgctgcctgtctttctctaatattatttgtttctttctttctttttttttttttttttttgagaagaggtttctctacataacctggctgccctggaacttgctctgtagaccaagcaggccttgaactcagagattcacttgcctctgcatcctgtgtactgggattaaaggcatacaacaacaccacaagtcccattatctgtttctaaagaaaactgctttgaattattgattgactttataccctgacattacttggtaactcactgatatataatgttaataatactagtattacaatgaattcaactggtaatttctttaacaaatcttcaaaatgaatttcttttctatactggagatcatatctagggccttacactaaggcatattctccacctccagatatttcttttaatgtgtgcatacacaaatatgtgtggggacacacatgccatggtgtgtgtgtgtacatcagaggacaacactggagttctcttcatccaccttcatctcactcctaaagactgaactcaagtctccaggctggccagacttcaacccctcagtcatctagcccacagctaggtctaagtgtctggacaaaaataataataacaataataatattaataataatgtcattcttttacttttatttcaacatatggtacctactttttctttctgttgtttttttttttggggggggggggtcaagacagggtttctctatatagccttggcttcctggaactttctctgtagaccaggttggcctcaaactcacagagatctgctggactctgccttctgagcgctgggattaaagtcatgtgtcatcaacagccagccctactttttcatataccctacattttatgattttttttttcaagactgataacaataagatccaaatctgaacttctgaaatgctttggagtttgcatatgctgatattccaaaatttagagaacttggtaagtgaaacaatcctgtctcaagtactgtggatatgagataaccaaccattactagagatttcaattttaagtacatgagaaatgagacttctgatgagatgactagtgccgatgtggcagctcagcaggaagacaaatttggtacccagcacccaaatgaagtacccgtgtaacaagccactgtaattccagtgcagaggcagagacaggaggatctcagccacttcctggccagccagtctagctaaatatgaaggctcaatgagaaattctgtctcaaatacataaggcagagcgattggggaagatgcttactgtcaacctccggtctccattatgtacatacattcacacacagagagactattctgtatttccaaagaaaaatttcctcttcatttaagaactgcactgctgcaaggtggtcatggcatttgcccatattcctagcactcaggaggcagtcagtcaaatatctgagttcaaggccagcctcatctacaaagtgagttccatgacaggaaggactacagagaaaccctgtctggggaaagacaaaaattaaagagaggaagggagggagggagggagggagggaggaaggaaggaaggaaggaaggaaggaaggaaggaaggaaggaaggaagggcaaagaaaatgctgaaggaaggaaagaagggcaaagaaaatgctgatgacctcccttctcaaaagaaatgggaaattaatgtcagcacttaggaggcaaaggcaggtggatctctgttgagtttaaggccagccttatctacatactgagttccaggacagtcttggatacaataagaaaaacttgtcttaaaacaattaaaagaaaaaggaggagggaagaatggaagacaaggagaagacgtagtcaatgactgcacactttggaaaaaagcagaatttttttgttttgttttttgagacagggtttccctgtgtagcctgtcctggaaccagctcttcagaccaggctgatcttgaactccacagagatccacctgcctctgcttcccaagtgctaggactaaaggcatgtaccaccactgtccaacaagaaaacataatcttttaaagtgaaaatcttctcccaaatcaagacagtgcatacagtatatgttcacagaaattattaggaaaataatgtcagacatttgtttttcccttattaatacacacacacacacacacacacacacacacacacacacactcacactttctctctctctctctctctctctctctctctctctctctctctctctctctctctctctgtgtccagaactgagcctcaagtattaaactacatcaaatacttcttgtgagttttcaaaggctggctaaaagaaatgaacctttatgacatactcacatggtacattttctaaaatctcttttaaaagcaagtcttacacctttacccttacatgaaatgtgttggaccactcacaattttagagctttaaaagtactcagacatcacctagtcaaatgctaaagaagttaggaggttaggattaaggttaaccaggacatagctttatcagtagccaactggagaacctcaaccctctgtgtcatggttccttaagcaagtttgtaaatatgcagttctggctagcctgtctacctctgcctcctcagggctggattaaggaaagcatcaccatgccccacccaaatgcaaatttagtaagaatattaagtcttgactacaaaacatttttaattttaagatgacactaatttgctagaagtttatttcgattatttagtcactaagttctttccaagtgtcactcattttacataactatcaggtaagtactacaattattataactactttttcatttgtacattatataaatttcatctgcgtgcctatatctgatgaattctttcaacaagataaagagatcattacatccatttacttataaaatgtgcagacattagagttggggatgtagctcagctagcagagtatatactgaatccaccagcacacacctgtaataaagcatccaggaggagcaggcaagagatcaaggccagcctcagctatatggaaagttgaaggccagtctgaggcacttgagacttgtcataaaaacaaaaaaattgaaagcattactctaccagtgccattaaaaactgtcagcaataggagctggagagatggttcagaggtgaagagcattagctgctctaccagaggtcctaagtacaattcccagcaacgagatggtgaatcacaaccatctataatgcattctgatgccttcttctggcctgcattgcaggcatacatacaggaagaacactgtgtacataataaataagtaaatctttaaaaaaaatcagcaataaaaaaattagaagcataaaatcatattttttaaaaaaaattcttgttttcttctccaggttttaactttgagtataccagcaaatcctcttaagtttccttctaaaagcctgcagagacattcaggttacatgaacatgagaggcgaaataaaataattatgtataaaacagtctttcatagcacactgtgatttaaaaacctttagttataagattttgagagcagtactcaaaaatcaagtagatctggaaaatggcatctaaagtcttagaaaaccagcatcagaagtggtgtagctctgtggtgagcacttgcccagcgtgccggaggccctggctcagatccctggcaccacaaaccaggacacctataaaaagacaaaaacatttattccaaagactatgtaatatgcactcccagcaaaatatctacaggccacattcagttttactggtaattccaaaggttcatggaaagaaacctcccacctgcagaattaagtcctgtgcctctacagtgtttctcaaggttctgactgaagaaactgtgctgtggttgcctcaagtattcacatgcactgaaaataacatctttggatttattaaattttttgccttatttacatgcaccatatgtgtgcctggtgtccatggtttagaagaggttgtatcccttggaactggagttccagatgattgtgagcatgggtactgagaaccaaatctagatcatctgcaagagcaacaagtggtcttaaccaatgagcacttctccagcccagaaatgtttgtagtatctcttgaactatacacactccacacccaaaacaccactaaccctaaccttgaaaatgtacactaacttatactgaacaaaacaaggatccaagttctcactgtgttctccctctcattcaataatagttcttatccaaaagaggtatttaaacgccgctcaataaattggtatttccatagggaattttgacatgtgcaaaatataccacagactaaccacaccattgcgttatatagtacatatgcttccattagtccagattttatttgaatttaaagttctgttaaatttagggataaacatatgttgatctttcttctcaatcgaactgagtcagctttgttagccaaactatcgaattcaagatccctacctaaaaacaatagatgggaaagactgttcagatcttttacagcagtactgcttggtgactatttctcatcttccacatcgatgatatgaaacagatccagaaaaggaccgcgtgcgcttattatttcagtaagcaacaatgttcaagcagtgccacatcgacctggggccctcgctgcactgtctgctagcaagtaaagctgctttttctatgtaacttaagtccgtgcccttccgctgcagcagtggcgcagcacatcccccacccccgcggccacttccgtgtttacactcctcttccctccaattccatgcgtacattgtcagcttcactcccgcccaatcttcattggctcggctcgggcccgtggtcccgcccccagaaatcaacgttcttatttggaacatctcagagcgcagattggaaccgcgggcctgtcaatcgcgcgcgttctgtcctctcccaggcgcttccgctatggtgggaggtttggggggaggggaaagggggctattccgagccgagacttccctggggccgggacgccctcccgcccgccctgcatctagctttcacccactgttgacaaaaataaacgttccccctcactgtcccaaagccccgggtcagcagcacagaatacaccccgtgtccttcccgtcccccctgaaacacccgcctcacgagggaaggaagggcagcagcctagtttctacaccgccgccgttagccggggcagggaggcgccggctcggcgtcccgctcagcaccgggaagtggcctcaagaccgttactccggcgcggctccgtgaggctggagacaggaggccgggcgcgttttggcgggtagctcccggggccgcggcgtccatgcggaagtggccgctgtgtgaagtgtgaggcgagggcggcgggcggccagcgcccccagccgcgggcaggggcggcctctcggccggacagcgtggcaggcggcggggacaacagccccgctcacttcctggttccccggcaactggggtgaagcgcgccactcgcccgcgccgactccccaacttagccgcggctccgtgcccggcccccgccgctgccgctgccgcgctgcccggagcgacagccgggttccgaggcaggttactctcccaggtgatcacttcctgatttgtcgcctccattacttcattctctcccccctctccgcgtccgcccggctgactgaggcggacaccggaccggggccctgaccgccccgggggacgctccccgtctgccgggcgccccctcgtcggctgcaccgatgcaccggagaaaagttcccctgcgcgtaccggcccggatgagcagatccagctggttcgtgggtccctcatgcagagacgtcgccatgttgatcccggggctggaactgctgcttcacattgacttacaccctgaacagcggcgacaggggagaaagcggaacccgcggccggagacacacgccgtgcgggcggcacacactcacgcactcgcacacactccgacgcccggatccttgcgcgtcctccgacaggaagcggcagccggcccgcctcccgccgccgggctgagcagccccaccacctaacggcaggggcggcggcggccccggctggcaacgcgatccttccgccccgcgcccagacaggaagtcccgggcgccggcagctagcggccgcacggacacctgaggctggggagccgcaggccgcccgccctcggggacgcgggcctcggcaggaagaggcgcacttcacgttctgcggaagcgaagtctgcaaatgtcccctctggaaaagagccatgaatcaaatttttcttcctagaagcgacctaataatacctagtcccgcagctgtacatgaaggtggctttttaacttgttttggcctctccaaagcttatgcagcgtacaatcagttcagttgaaagaactgcactttaaaaactcgtacctagaaaatattctaaaaacatcactagggaagtcaggagtctccaactacttcaaagacgacttggtccttttctccacagaagtcagagtacagtagacaggtatttagtaaacaacagagcagtcagccagcctcagggagactggattaaagtcgctcagtttcctggtcatgaaattcgtgttccctctcttttatttggttcacgtggacaaatgaacatattcgttcatcttaaacatatcctaagttatcctttagaagaatcctgacaaatatatactacaacaggaaagggaaatatgcggccaattagtggctataaattagtggaaatggaggggatcagaccacataaaatgccaagtaagacctaagcaaaatgccttgcttgtttcataatttcttaacataaaaactgaaacaaaaatgttaccctgaaagttttccacacacaatgtaaaatgtaactcaagtagataatgcgttcgataacaatttattgagtaaataagcatcttaattgcaggattacaaattttatctgagttagctgcttatagttattttcaacagtaatataatacaatattatttataagtttacccaacaccactgcagcatcagatgggtttacttaagactgccatgcataggacaaaaggaaccagctaactgataacttttatttttcattgctatcaacttgaaataaggatctcccattgatgggcagcatctttagcagtttccgtatcaggaaagataaagaatactaaagggtaatttgttgactttaggtggctcgtagaaactggtaacaaatcagaatttctactccagtaacatattttccatgtatttcctatttagtacaaaaatgggaaccaaagggtgggtgggtgtgtgtgtgtatgtacgtgtgtgtgtgtgtgtgtgtgtgtgtgtgtgtgtgtgtgtgtgtaggtggcatgtcaacatggcttaaaaacaataaaacagtattctcaatataggattagtttgaagtctgatacacttttaccttactgtacttcagatatatctgaagcaatgtgaatatatgtatgtatgtaagcatgtatgtgctttgctggttgtacatcctaatcatgtatccatgtctagcttacattttaagcaccaacagaatagaagctatataccttcttgcataataatttatatacttaacacatacatacacagaaagtaacacaaaaagactgtaaaacacaacattccattatatttggaatgtataaaagcagaatccccaaatttagtacaagtctgccttgccttaaataggctttcaaaagccaccaatactttactgagaagaataagtagaataggctataagtagcatatatacgggcacaaactggcattatggtgtttaccaagcatctaatatgtatacctgtgtgtatatacaaatatttatcttcagttttcaagaatccacgatcaagcagttatttataagctggatttttactaaatatgaatgcataggctttgatggtagttaccttaaaataaactcaattctgctaataaaactacagaaagacaatactgtctaaaagttacttatgtcccagcagagagagaaaaaaaggtaaataccagatctgactgcttaccaaataaaagcctgaatgctaaatactttacctcatttctttttatgtattttgtccacatccctatataataggcattactattatgttcatttcattgatgaaacgtatctaaggatccttgcttaatgttacagttggttatgaaagggtcagaatttgaacccagtgtccttactctccaccatttgccaggaatgaaactaacatccctacttatctgtcacaccaattttctcattacaatttctttttgatagttcccccttaaagagatgtagtctagtcttcctctcactggacatattcctcacagctaacaaacagaataaagctgaagtgcctcggtcacaaaccctaaaaggaagccaaataccttgtcataaataacctcagcaggcctgtgatgttggggcaggaacaatagcatgctaccaacaactgtaaaatgagctatatgggagacattctccaaccctaaccaaatcttgagatgactaacccattgacaagactacaggcagcctcatggaagaccctgagccaggaccatgtatctaagccacatcctaaccttaaacctcaaaaactgtgggaaggtagatatttggtattttaaaatgctaaattgggtgtagtttgttaattaaaaatagaaagaatgggtgggttaaaaaccattatattcttcaaatatttaacacttattcttcaaatcaagtctttatactgttgagtatatttatgtgtttgtgtgaacatacttgagtggcatattggttaaataaatgtcattacattacattttcattacattccttttttcatgaaggagctacactcaatccctgataatgtaagtaaatacagccatatgctttataaattctacaaagcatttcagtgaatgaacttactcaactgtatttacgaaatttctcctttgttagataaaacttccctctttaaaattattaatgattacttcttattattttaaattagatgtatgtctgtgtgtagtatgtgcacatgagtacaggcgctcaaagaggcagaggaattggattccccaggaaatggagttacaggtaggtgtaaccacctgacatggtttctaggaattgaactagtaacttctggtagagcaggacaggctcttaactgtagagacatctctctagtttagtttcctttctcaaagagggttttttgttttgttttttttcttcatttgttttatagtattagtgactgaacctagagcctcacacatgctaagaaagctctctggctgggtaggctatgctgtcttttccagtctataaaatgttaacatattctagattataaaacatatgtttcagatatcttctgtcagcctgctgtttaatatatatctcaaattggtcatcctaaagaagttcaatttttgatgtcgaattatacctattttcccatacaagatataataataatatttcagataaaaagtaaattacagaagaattaagaaatatttagggactggcaaagatggctcatttgataaaggccagagctaggtccatgcacgtgcacgcacatgtatgcgtgcgcgcggacacacacacacacacacacacacacacacacacaaattctaattttttaaagaaatattcagaaatgaattatgaaaatgcaaaatgtcaagctatgtgtgacacaactaaaacagtactaaaaataggcttcaaaataaatgattaagctgcaatgccttgtggtacacccagttaaccccagcactggagcgccaaggcaggcatagctctgggagtttgaggccagcctggtctacaggtgagctccaggacagccaggactatatatagaaatgctgtctcaagaaaccaaaagtaaacaaactaagcattcaattcagaaagaaaaaaaagtaaatcaagagaaaggaaataacaggaaaaattaaataattcaactttgaacagaatttttaaaaagagaaggaagattcataaagacaaaaggtgattttgtaaagactcagcaaggatcatcataaaagtaaaaatataatatttaatgtgtgtgtgtgtgtgtgtgtgtgtgtgtgtgtgtatacacaatactgaatagatacctaccaatacaacaacatggttttgttgttgttgttttggtttctcaagacagggtttctctgtatagctttggagcctgtcctggaactagctctggtagaccaggctggtctagaactcacagaggactgcctctgcctcccgagtgctggaactaaaggcatgtgccaccactgcctggcacaataacatgtttttatgaagctttatgttaataaatgtggcataaaatctgaataaagtctgtaatcactagaaatagactcatgcttaaagctgagatggtaaatttcaaaaacataaatcgtaaagaacttaaaatcttgtccaaaatcatctgtactcaaaaaaatttccagatttgaatatctttttaggtagtacaaaattctcaatttgaaataatagacaatttgttaccaaacatgggaaaaaatacatgaaactacctgtgttccttttgagcccagtttgattctaaaactacttaaggacaatgtaagaaaataaaatcatgtatgaatatacatgcaaaagtcaaaagacctccctaagaacaaagaacaatgacagtgacattgattctcagattgcaatgaggtcaacatttgaccatattcataaaggagggcacaacaatcatatatgcagcagctttaagtaagtgattagatgtatgctaagaaacatgcgtgcacattaagaacagtgcttgcttaaaaaaaaataggaaactgagacacctaataatagttactcaaggtataaagatatataatcaggcataaatgtaagaatatacactaatcaaattaaattggatgctcacgtgggagctagacacaaagcacttatatacaaaagataataaggaataaatcaccttaaagtataaaacaaatccaattttacatttctctatccctataaatccttctcccaacctcccgtgtgtgtgtgtgtgtgtgtgtgtgtgtgtgtgtgtgtgtgtgtgtgtgtgtgtgtttgtgcgcgtgcacgcgcacacacatgcacacgcacacgcgttacatcttcacttcttattttcaaatgtatgtctactaaatactaggtatggatattcatactctgtttctagaccctcaatctacctattaactattatttccctgcagtacatttttttctttcaccttttctcctcttctctcttcctctcacttgtttggtttgggggtgtttttgtgtgtgtgtttggtttttttttttttaagacagggtttctctgtgcagccctgactgtcctggaactcactttgtagactagggtggccttgaactcagagacctacctgcctctgcctcctgagtgggcatacaccaccaccacccagcttctcatttgttttcaagcacctgtctgtatctatctgtatgggtgtttctaggctctctactcttttctatggatcttcttatgataataacactttatcaccgaagtcctgccaactgatttatttttaattaaataagttaataacaatttaataaatttttaattttatgttttgttttttcaagacagggtttccctggccatcctggaactcactctatagacaaggctggactcaaactcagaaatccacctgcctctaccaccacctctgctaccaccaccaggcctgatttatttcctttttgttgttgttgttgttgtcgtttttttaaaataatttggttatttctgactttatgtacattgttgttttgcctacaggtatgtctatattgaggcatcaggtcccctggaagaggagttacagacagttgtgggctgccatatgggtgctgagaattgaacctggttcctctggaagagtagtcagtgctcttaagtgctgagccatctctccagcccccctgatttattttcttaaaaataaaatagttttaactactttctttttaaattttgtatgtatgagtgttttgcctgaatataagtctgtatacaacatgcatgcctggtatccgcagatcccagaagagggtgttgaatgccgggaaactggagttacagatagttgggaatgaagccttaggtgctcttaactgctgagccatctctgcaactccttttccccttttctttcttcttagacagaatctctctatatccacagacctcaacttatgagatgcatgaccccttgggggcggggaaagtcaaacaaccgtttcatgggtgtccaacattaggtatcctacatgtcaagtatttacaattcatagcagtagcaaaattgcacttatgaagtagtaacaaaaatcattttatggttgggggtcaccacaatgtgaggaactgtattacagggttgcaacattaggaaggttgagaaccattgctctatatagctctaagcattgaacttgccttggtctcccaagtactgagattataaaatactcctgtcatgcctgtactttctatttcctacagcttcagattcttttctccctctgtccctttccttctaagggttaaatccagggcgctatgtacactaagcacacacccttctggccagggctacaggcacacagctctttcgttctttcacagaatgtctagagcagtggttctcagccttcctaatgcttcaaccctttaacacagttcctcatgttgtgtagaccccaactgcacaattattctcattgctactttataactgtaattctgttactgttatgaattgtaatgcaaatattttggaagatagagggttgttgaaggattcatgacccacagcttaagaaccactggtttgaactctattgagttccatattttaaagtttgtcaagttctgccaaaagcacatctgcatggattctgactggaagaaaactgggttgtacattagctggagaaggaagacaagatttatcatcctccgttttctcatatatttttggaataaagattaaaagaataaattttgatccacttaggttttcaatgagtgagacattgctatggtaaacaggccacatgtgctgtcagatttattcttaggtacctaatgaagatttttctatttggtttggattttactgtcagtttatgttttatttccttactgagtactgctgttgtatacagcaaccctgataagtcctttatcagggcttaatgtatgtatgagtagtcctttagattttaattgcaaagaatgacagttttgtttttttctcaaaaccttttaatgtatctatgtagtactgggaattgaacttagggctttgtgcgttcgaggcaagcactttacagctgagccacacctcaacactacttattctcatcattaaaactttcctccgctgctggatagtttttatatcaagttaaccaggctagagtcattctggaagagatatcaattgagaaaatgtccccaccagactggcctgtgggacatttttttttcttaattaatgatttatgtgggagggaccagacgttgcaggtgtgccactgatggggtgtataagaaaacaagctaagcaaattacaggaagcaagcagagctcttccatggcctctccttcagttcctgccacttcgctcgatcctgccttgcctgagttcttgcccctcacttccctcagtaatgtatgttacctggcagtgtaagcctaaataagccctttcctacacaagttgcttttggtcatggtcaagatgttgtatcacagcaacagaaatccaaactaaagcatcactgtagtctatgttactgcagtgagtctccactaagtgatagtaatagttactgtaagttggtgttttgaaacagtcttaagcccaagctgccttgaacttgatactggttttcctgagtattgagattacattcacgagccacaataaccagtttactgtacatttctactaatatcccttgtaaggttccaattaagtctttttttaattattcttttttaaaggttttatttatttattatgtatacaacattctgcttccatgtatatctgcacacctgaagagggcaccagatctcataagggatggttgtgagccaccaagtggttgcggggaattgaactcagatcctctggaagagcagccagtgctcttaacctctgagccacctctccagcccccgacaaaacatcttttatcacaattgcttttcaaaactgagcacacagtagaattatttgaaaggcttgtaaaaatacggaatgctgcaacagagttcctaatggaggtaactgcatcttttttgagtttaagacatcaatggctgtgtcatacccgaagtgacattttgcacacagcccttttccttatctcacagttcttacattctccctacctcaaattccaaattgtttcctgagcctcagaggtggtgatgaaaatgtcttgtgtgctcaacactcatccatcacttattctcagcacctacagcagctgtgggtctctacattcaccactattctcagcaaagagaagcttctctcattaaaagtaaggatagcgtgtatctatatgtatataagcctagacattcataaggcatttgaaaaagaatagtaagttccctccccagccatgtttttatgaagtttaaagtaccatatatgggtgccctcctgtgtcaccgcctcaaaccaacaagagacaagtggacacatcttgtgtagcagattggtttggaagtgcatagcattcatgtctttgtaaaactattgggtgtcttttctccccgaagcagcctacatggtgctgtccagcacaatgaaagctagccagcagacaggaagtccctaactcagtcccagcttttctctacatcttacaaccaaagtatacagtcttcagcaacagggtcttaccacctaagtcaggcgggtaggcaagaggaggggcaaaagccacttttgttttaggggactctggagtcctaatcaaaatcactcagcagtatccacatctgacttggggttttgtttagtgaaccaaggccctaggagcagcactatcagccttgcaggacatcttcagtctttcctttaataatattattaatggtgaaaagatagcagtgtgcatatagcttttttaaaaaaagattttatttatttattatgtatacaacattctgcttccatgtatatctgcacaccagaagagagccccagatctcataacgaatggttgtgagccaccatgtggttgctgggaattgaactcaggacctctggaagaacagccggtgctcttaacctctgagccatctctccagcccaaatacagcttttttatacctttttataattaatcctcccttctgctcccacaaaaatttcatagttttagcattatctgttttataagttttcaaattccttagcagtagcctgttcataatgttgttttgacttacgttttttgttgcagggggaaaatacaacagtttactagaggagaaagaaatgaccttgagttatcagagttattagaccaaagtcccattccaaaagggcactagtgattttttttttaaactctctatcgtatacttgtattcctagtgcttatttttccttattattttgtagcactccatccatttttctggtttattttctctttcatcaattttgatgtttttgcttttatctttatttggtttgaagctttcaccatataaacattttaccctttatcttgtaatcatagcatttaaaaaaaaaaaaaaggtggaaagcagggaagatcaggagttcaaggtcagcctccattacacaggaaggttgaagccagcccaagctacatgaaaaccccctctcagaaaaaaaaggaggaaaacaaacctgtaattagttcccattggttacttcattttgttttactctgtcagtgccttattggcatctaggtataatcatatgctcatattaatcttttttatcttcaaaaatactttaggtgttttatttttatgtgtatgtgttttgactgcacgcatgtatgtgagccacttgcaagcctgggtcctgctgaggtcagaaggaggcatcagatgccctggaacaggagttatggatggttgtcagtctcaatctgggagctgggaactgaacttggtcttctgcaagaacaagaagtacttacaagtagtgaaccatctccctagctccacaaaataaatttgtagctacagtattttccagtaggttatttgcctttttattatattcattgtatggggtttgtatgtactcatgtgaccatgctcatgccatggtccacttgtggaggtcagaagtcaacttgagggtgtcaacttgcaggggatctttccttccaccatgtgggtcctgaggatcaaatccaggttgccagatttggtagcaggcactttaccactgaccatctcaacagcaacaacaatttattttatttttaaagatctttcttttttctctttctgttttttctgtctttttgagacagggtcccactgtgtagccctggaattcactctgtagaccagcttgccctcaagctcaagagagtttgcctctgtgtcctgagtgctgggattaaaggtgtgtgcaccactgcctggccagatttccttttttaaattcatgtgtctgtgggagtgtgtgccgtatgagtatgggtttctgctgaggccagaagaaggtgtcagatcccttagagcaggggtcacaggtagctgtgagccacctgatgtggaaccatgctagaaagtgaaaaaagtgcacctaacctgctggactctctctccagctcccccccaccccaaatcctattaaagcaacttgctttacaacttggttttacttcttctacttcacagctgtgtcagatgtacagaagttaatgattacacttcagaactatttctctcatctgtttaggatcccctttgtcctaattaaagatgttcataataaattctttttttgaagatttatttattatgtatacagtgttctgcctgcatgtatcccaacagtccacaagagggcacaagatcccactacagatggttgtgagccattgtgtggttgctgagaattgaactctggacatatggaagaccagctagtgttcttcaccactgagccgtctctccagaccctgataaattctttttataaataatatttccttcagttaatacttttctggtgaaatgcttgtccatttaataaattttattttttgttctgttatttatctcctgtttctactatttggtctacttttggtgagtctattataaatagcagatgtgtttgattcatactattaattagacatgttttaaacttctattatcatgatttatgatttcaatatccatcattttccacagttgttaggttggatgaagtttaatttattcccttgtcaaacccacaacttagtattttttttcttttaagatttatttatttatgtttacagtgttctgcctgtatgtatgtcttcaggccagaagagggcactgatttcattacagatggttgtgagccaccatgtggttgctgggaattgaactcggaacctttggaagagcaggcggtgctcttaatcactgagccatctctccagcccccaaacttagtattttacaagctgtctttgttttgttttgttttattttgagacatgatctcgtgttgtagcccacactgtttcaacctcctgatggacagaatctcaagcatgtgctaccacactcagtgtcaaagctacaacttctgttctgttcacagtgtatgatttcaatcccttctggccttctctctaaccacacctactgcagtggctaaactagctgaactccaactgcatagcttgtcagtctctgaataaaccacaaatttctggttcatgttgtctcctcaataattaaaaaatagtctattgtgacattatggagcacatcatacaagtttaatcaaatcaaatcaaatcataatacagctggataaaagttcatgaatgcatgaattcatgtaaattaactgttccctttgaatccaatgagttccacatccttgaattcaaccacctagctgaaaaatatttgaaaggggtgggggctgcactggactggaataaccacaaacagtcctgtatagcaactatttataaaacatctatattgtactaggttatcagaatgacatgatgtatggtatacaagagattgtgtgaaggttattcagaaatactgccattttgtaaaagaaaattgagtggcattgaggcttctaattcaagacaagagcttaatatgtagccgaggctggtcttgaactcacaatccttccacctcagtcttataagtacaggaattacagcatcacccacagaagctggtactgagggggagagagagagtcctagaatcagtgcgtcaaacagttggacaaggtagcacatgcctgtgatcccacacttgagaagtgaaaggcagggagggtggggtttcaataatcctctattacactggaagtccaagaccagactgagctacataagaccctgtctcatagagaataaaaagaaaaacactgttttccatatgctattcttgtcatcaaagaacacccataaaagcacataagcaccaccagatggcactaaaccacagccagactttgaattaatttggctaacatagagcaacttgtagaacccatcacacacatccacacattcctttcactccgcactgccattcactttccccatatcttactcctctgcacaaatgacccaagtcagttcaccaatttacattaatagtacatttccaaaaattcaaaccatttcttgtgctttggactgttgggaagtatttactgcctcatatatttattatcctagtttatctcaaagttgtagtgctagtctatgctaaaaatgccaaaacaaactggaaaaatggaaggcaatctgttccaggaagtaaacagcatatgtgggaatgaagcaatggctctgccattaagggcaactcttccaaaagacccccactttggttcccagcacccacatcaggtggctcacaacaatcagtacgtctagctctaagagatgccattccctcttctggcctccaaattaacctgcacacatgaagcttacactcatacaaataaaaaaagatacttttctttctttcttttttttctgagacagggtttttctgtggctttggaggctgtcctggaactagctcttgtagaccaggctggtctcgcactcacagagatccacctgcctctgcctcccaagtgctgggactaaaggctgccactgcctggctaaaaaataaatacttttaaaaagaaacttgggccagacaagcagtggcacatgccttaatcccagcagaggcagaggcagaggcagaggcaggaagacttccaagtttgaagccagcctaatctacaaagggagttccaggacagccaagaatacacagagaaaccctgtctcgaaaatataaataaataaaattttaaaaaaaaggaaggaaggaaggaaggaagggagagaaactaggatatgtcaagacccaaaaatctttttaaaagcttgcatatacatatttatatttacaaaatttcatgactgagtgtttttgcctgcatgtcaatgcaccaccctcaagcagtgcctatggagatcagaaaagggcactagatgccctggaactggtagtaaactgtttgagccacgatacaggtgctgcaaatcaaacctgtgtctgctggaagagcagccatcgatcttaaccactgatccacctctccagcccaacacccaacagaatttggattaatagaagcagttaaaagtgtgtgtgtgtgtgtgtgtgtgtgtgtgtgtgtgtgtgtgtgtgtgtgtgtgtgtgtagagaaggaatatgatacaattcaccagaagcttgaaggtgtactcttgagctactaactctctgggtttaaatacctgcttctacacttggagaaatgatttagcctagtgttgctgacagcaaattatgttaatatataaaacactcagaactattcctagcaatagaatgatgaaacttcttatgttcgaaagattttgtcctttatttttgttgctgcttttggttttccctttactacttctaagtatgcaaaaaggaggcacattcaagacacaagggggtgagcctaggccctatcccaaaggctatgatagactctgatgaccccctatggaaggcctcacccccccctggagagcaaaaaggatatgtgataggtagggtttagttggtggggagggtggtaggtgaagagtggagggagagggaactgggattgacatgtaatacaatgtttctaattcaaatttttaaaaaaatcaaaaaaaagaaaccttaaaaaaaaaaggaggcaaatttcagtgtcttgagctctcaaagtaatcctaggcatagtaacacatgtctataatcccagcacttgagaggcagcagccaaggcagcagggaatctgccaagaaaagggggggaggagggggagggtaactcagctctagatgcttacatagcatttacaagggcttgaatataatacccagcactgcaaagaaaaataataataatccattgaacttcatcctgtgtacaattagaactcactttaaaggtagaagagggggagacagagagaaaggaggggaaaagaaaaagacaaaggtagagacatatcacttccatcacacacacacacacacacacacacacacacacacacacacacacacagagagagagagagatgacatttaggaatgcttattccatgtggcttgttagctcctctgcccctaacaccattaactgccaaccatattctcaatgatgaaatttattcatttatttattttcttctttttcttaagactttttttttttgtctcttttatgtagctctagatgacctagaactggttttgtaggcctaaccctaaccctaaccctaacaaatgtgacctaaggggaatgggaaatggcacctgtgcctccctccactgcttgagaggaaagatccccagtttacttcagtctgtttctaaatgatatctccaaagatatataatctgatttatgacaagaagccttgaagtatgttgaacacacatgtcccaaaatgcagactgcttatctcatctgtcactgtagcctgtgccttaaagagtccctgacacacagtaggtaaccagcaggtgtttattagtgttggaagggtgcccttgccagtctgagtgtggaggtcagaagacaacttttagggacatttctttccttccactacttgggttctaaggaacaaactctcaaactcacatcttcaggggtgaggtaaagcacctttagtcactgagccaagaattaattaaaggtaataatgtatcctttcaagcacataaaagaattttaacaccctctcccaataactactgtagtaattaaaacagagtaagaaactacagtgattattgattggatttttagagtaacagcagctctcttttcctataattgttcccagcagtcaagggaggctatcaaagaatgtcttatgaccaacatcattagtatcacctaaagacattggttaagtcaaaccacagacccactaaattagaaacatggcctaccaaccaagtatggtgtgagctgctgtagccctatgttccaggaaggctgaggcaggaggctcatttgacctcaaatgttagaaaccagcctaagtaacaaacataacaagacctcatcttaaaaaacaaaatgaaacaaactctgttgcagcattccgtatttttacaagcttttcaaataattctgtgtgctcagttttgaaaagcaattgtgataaaagatgttttgtcggggactgaagaggtggctcagaggttaagagcactggctgctcttccagaggtcctgagttcaattcccagcaaccacatggtggctcacaaccatctgtaatgagatttggtgccctcttctgacatgcaggcagaacactgtatacataataaataaataaacaatgcttttaaaaataaacaagatgttttgttatacagacaaaagatgagtggcagttaaaacaacaaatggggtcagcaagagggatgagtagataaaggcaccaaacccaaagcctgagaacctgagtttgctctccacccagacttacatggtgagaaaggagtactctgagcatactcaaaaataaataaatgaaataaaaaaaattaaaagcatggatgacaactggcttctaaatgaagctcacatgtcaatttttaaattcaagcatcaacaatgatattaataatatttgtgacttcttgactaataataaatgcatatttcacaccatgctgcatttgttatcgataccaaagtagaagttacagtcagcattactttgtaatgacagcagtaaaacagaccttccgggcttgatgtgctaatggagagacacctgctctgacaccacaatggacagtctgacaactcgccttagcatgtgtgctccctggcagtgctaggtattttgcttttgatttttaaaacattctaaaagaagaatcacaggcttcaccctatggccaacaagttccacaacacaggaagactggaaaccctcacagatgttaagcagagcatcaacactgtgcctgctttcttcccagtgaagcactcctttaccaacctgaacaaacatttgcacaaagatatttacagatgctctccaccccacctcatagcaccccgaccaccttacaagatatttgagttttaaagttgtcttgttaaaaataaaacatgatgttaagtatattaataattacctgctaattagtaactataaatgaaagaaacacttttaccgttctactagggaagttttacattttagaggatttcaataaaaacacttgtcaacaattagcagagttctgagttccttactctcctttccagaacactggacattttaaatgtagaaatctgtgaatgttagaatgtgaatgcacaccattacagtttggatctgaaatgtcccacacagattcttacgctgaatgcttggtccccagatgctaggtggaactgttctgggaaagttctggaaactttagtttggtagtaattttttctttctttttagaaacctccccacgctctttggtctcggcggcagaaacaagataacgaaaggaacgtcatcctttggaaagcgtcgcaataagacgcacacgttgtgctgccactgtggctctaaggcctaccactttcagaagtccacctgtggaaatgtggctaccctgctaagcacaagagaaagtataactgagtgccaaggctaagaggtgaaacactaccgggactgggccgatgaggcacctaaaaattgtctatcgaagattcagacatggattccgtgaagggacaacacctaaacccaagagggcagctgttgcagcatccagttcatcttgaggatttcagtcagtcataaaaataaaatgttctggtttcaaaaaaaaaaaaaagaaacctcacacacacacacactttattttcctttctttcctttcctcttttcttttcttttttcttttcttttcttttcttttctttttcttttcttttttcttttctttgtgtcttgctttgttttgttgagacactcttactatgtagccctggctagtctgtaactcaccagcctctgcctcccaagtgctgagatgaaagaaatacctgaacaccatctaaacacctgtttagatttttcaaacaggaccttgctatgtagctcaggctggcctcaaacctgcaatcctcctgcctcagcttctcaactggtgggattacaggaatgtatcatcatttcagttcactttggaaacgttaggaggtgggacctagctgggggaactaggtcgctggaaatgggatcttactgctatcttgttccggtccttgtctctgcttcttgtacaccacatgctccttcctccacaatgttcgcctacacagatggagccaagcaacataatgtcagcttagtggcatttaattttaaaatgttttatagaaacatttgagatgctcaggtcccaaagtaatgttctacagcaaacagaaggaggctaccacaggaatcaacagactaagagtttctgaaccctctcaaacgctaactcaactcaagcctagaccacattatcactaaaattgcctcctactatatattttttaaatctctggatttagccaggagttgtggcagatgtctgtaatcctagcaactcagaagactgacaaaggagtttgaggctcatgaactacatagtgagttccaggccagattgagctatgtagccaagaccctaactcaaaattacatacatagagacatacagacatacatatatacaaaaataaaaaacaattcaaggaattctaaaggctaataagcacgccccaaaacatcagggcaaggtgagagagagaaaagagatgtggcaaattcagaagggaaatggagcgtgtgctgaaacaagcgtggctttattaaatgggtgaatgtctatggacagacagtgaggggccatagaaatgagaaccggttgcttaaggaaggtcccaaaagactcacaaatgagtaggatgggacagtcatagtcattcattcgaatgttttaatataaacataacaggaccaaataagtagacatgcctcatgccctagtacctgcagctgtttcagtaacagtgatgcaatgaaagaaaaaggaagcatcatagcaactcgtctttatttacagaaaagcatactgttaaacatctgctatgggagctgttaccccccacccacccacacacacacacacacaaaagccttgagacaccatgaccaaggcaacttatttaaaacatttatttgggatatatggtttcagagagttgaagtccatgaccatcagggtggtaggcaggtaggcgtggtactagaacaatagctaagcattcatattctgagacagaaccacaaggcagatagactccaaatagtggcagtcttttgaaacctcaaagcatccccggtgaccaaacttctccaacaagaccacacctcttagtccttcccaaacagttccacactcaaatatatgagcctattggagtcatcaaaccaccacaggaaccatcctaaacaagccttgcacataatggcaagcacactatcacagagctacatctgctactgctaatactgatatttttttctagtgaacattttatgtacctaccatttcaaccactaaggaaaattctctctctctctctcactctctctctctctctctctctctctctctctctcgcgtgtgtgtgtgtgtgtgtgtgtgtgtgtgtgtgtgtgtgtttcaagtcaaggaagaaaaaattcttaagtttgaaaactttatagccagagaaatgtgtcactggaataatggaagaaaaggctaccccaaaatcagtaataaaactgattcttcaggtgccaaaatgaagcttctaaccatcaacagagaacagaattaagtcctaaccccctggccaatatgaaaggctcataccacatttgtagcccagtatctgtctgcatgtttctacagacaaatgtaaggcagatgccaacaacatctgcatatgccaggaaataaaagtaacatgaagttaagcttggatactaggataactgacccttcattttcatagaatggcgttctagttgggagaaagaatgaatacacactcagtcatgcttatttgtacttaaacaagatgtcccaattccctgtacattttgatactgccctgcttcaaggccctaatttttatcatatatatgtatgcagtgatatattgtttatggtctaacaaagccaccggggatgcaaagatagtcaccgccatagagtcaggcagtggggatacacacctttaatcccaggactaaggagataggcagatggatctctgtgagttcaaggccactcagggttacacaagagtgagtcagtctaaaagaggaacagagctcacacctttaatcccagcactagagaggtataagaagcaaagggtctcatgtgagatttagtttacagacacagagcatttgcctctgagcattcatatagagagcattgtctctgaggattcatggagacaggattgccatttcagcttagtagaggtaagagctactggattggctgctttgctttttctgatcttcagtttgaaccccaatatctgtctctgggtttttattattcgtattacatatctaagtccctattaaaaaaacaagtgatacaataaatataccactttttaattacctgaataaatgatactagatgtctcacctatatttttcagtaagcactgttcttaccgtgtacacttgatgcttagaatacatctaataagttacttcaagctgctgcataaatggttgttgtgataaatcatgttttccccatctctaagaaattgctgttgaactcgtttgctcacttgcttttggcaactaaaatggtcatataagatcccataccagtgatgtagtgactccatcccacggttactatgagaaccacagtacaagagtagaaggcaccagactgagtgagtttacccacaatcatgccaaggtttatgaattcccatggcaaatcaatgggcacttgttttaaatattgtaagttatatgtttttaaattcccaacatttttatatatgtattttattgtacgggcccttaaaaatagccttttcatatataattatccttatagcatatagtatgacacaaggcccaaaacaccaactcttcatcatgccagtgaaaatataaacatgtgattatttgtataaagtgctaaaaaatacgagaaagggtctcaagataacttttatttatagacatcagaatcaaaagattaacttagctttctagcccaaatgattaaaataatgtccctattacgtaacatagaggccaacagccctacataatcccgacagttcaacaaacagaatggttctcagtcaggccggatgctgtgtctcctgtgtctcaggccacagtaagacctacactcaacagtgtgcaggaggagattagggcagtggttcctcctcttgtgcatcagccctgtacacagcacccaccttcttcactccgcctatccaaccatcatcttagctgctaccactttcatggacctacaactgtagtccaaatctgcagaggcagacaacttagggaaagtgcttccttgtcttactatcttttcatttattgtactccatatgttgggaacaactaaaattgtattgttttaattggcctaaaacttacaggcagttctctatttccctttagtaaagttccgtccttggatccaaagctttaaaagcccattacttcccttctccccacaccaaatctccttctgccacacagaagccatgttcctccagacaccctttacaaaccactttcttggggaggcattccctgacctccctggcaattcccacattttatattgccataaactacactaacttgtttaatctcttctataaagctgaaagctcagtgagagcaaaggctcctgtatgcctcatgaaagtcctctctgaactggccagaaagaagatggaaggggaaagacgggttaaaagcatgaacaacataaagactaaagttaataaaactgacttatattaggattttcatgaaataagcagattttagcttttagcttttcttgtaacaaaaagatatgtctgagatgacagctgtattattctgctccaatatagtaaccattttcctactcacagtgtatgtatttcatagcataatgttgtaaactccaaaaataggcagtaatttttaaagtgcaaataattcatataaaagcctctcctcaaccaaattaataaaacttgtaatacatagatacactgttttatagtaacatttaaagtaacagctttatctttactaacactttctgtccgtgtatgatgtgtgtatatcctgatgtgtatgatgtatgtacaaacattcatgtgtgtacatgtgtgcctcagtatgtggagttcagaagacaacttcagatgttggtcctcaccctctatcttatttttgagacagaatctctgctgtttttctgttgcatgaaccatctctccagcctccttaactagtgtttttgttttttaatatcttgaatacaaaagaatgttatcatttctgaaacaaaaaattcttttaaagtgacctattttctaacatacttttcattatttctctataaaacagatttctataaaaatagtacttaaagtaattctttttcattgctgcttagcaattggcagagcaattatttgctttgggccatttttcccattatgtatgtctgtatgtgtatgcacacttgtacttgagtactcagaagccagactaggctttaaattatctggagataaagttacaggtggatgtaagcacctggatgtaggtgataggaaccaaattcaggtcctttgcaagaatatcaaccttgctattaaccacagagcatttctcctgcccatatgttttgtttctaagatatggtctaacgacacaccccatggtagccttggactaatgatcctcctgcctcagcctcatatgtgctggatttaaaagcatgagccatcacacttaggaaatttttggatttttagtatcttgtcttaaaagacagtgaagaattctaaatggaaaatgagcatacataacgacttccacactacagcttgcccccatttttcataaactggacattttaatatctaattccaagtaaacagcaattggagatttggggaagattcataataataacatcatattcactaattctccgatgcaatttttcacattcgacatgtctgaaactggattgtgtcttataatcaatgacctcttactgcatataactagaagcatcttcctcctccactggtataaagtaatggtttttaaccactgatagcctcaggttaaatgaaacttaagatattaaaatactaaagactttctccaataatgctttcgagattattttagtcacagtacaattataattcaattattccagaaagaaaactcagtaactttgaggttcatgttttgccatttctacgaccaaccccaagaaaacagacaattgaaagaaaacattttaaaggatttggaaaaacatctgtattggaagagggaacagaaggaaagggacaagaggtcttgagtgcagcttcaaggcatcacaggctcaggcctccctggaactttacccagggcaaggtaaggggacaacgtggacagcaaactgcataggtgaagatactactttattatctcttcttaaggaggagtctgtcattctttaaataaaaatatgacataggtagatgaaataattgtaatgaaatacaataccataaacattcttaataaattaaaagccaacctaccagcattgtcttcctcctggctcaatctgtttcaccttcaggtaatcctaggactggggctccttttcaggtccccaattctcaagtcgatcttctacctccctgtggcaacaatattttctaattaaaagagtccttttgtgccacagggaggatttctgatggtataacaaatacagaagttatcacagctcattataaagtcagacctgtcctgacattcaagacagaaatccggtttctgatatttcaataaagaaatctgactttattctttcaaactgtgtttataaatctcaactttcatttgctaaaaagtaacctttagctttcttactgaattatgtaaaaattcttattcttctttcaactaacctttaaaccaaatttttgttgctcactaaaacagttttaaggttttttttttacatttttacttattgtacatttgtgagtgtgtatatatgcaggcattcatgtaccaggacaagtgaatggaaatcagaggctaacctccaagagttattctctcactccaccatgtgggtcccaaagatcaaactcaggttatcaggcttgtggttgcaagcacttttacccactgagccatcatgccagcccataaaatacagattagattttttaaaaagttttcttggtaattaaatacaagaataaccttttatacttcagtggctgcatacaaagcaaagtcatgtgatgacttctcagaagagatgtaggaattgtaaaaagactgaagatcaacatatctacttgtgatgcattctaagaccaacccaaagaagatgacatgacaactacaaaaagcagtgctcagatgagtatggtagcacaggctagttgctccagctacctgcaagactggggcagaaagacagtttgagcccatggtttaggctaacctgggcagcacataagatttgcatcaaataataatattgattttttaaagattaaaacatgtcaataccaaatttgtgttatttgaatttcttaaagaagcaatcatgcctcactgatagtgatgactttcagtttgttcattttttgtaatacttcccaatttttccattgatcatatactgctttcattgtaaggaaaaaaaatcaaacttaggtattataaaagttattaaaatgacgggcctggagagatgactcagtggttaaaagcactggctgctcttccagaggtcctgaattcaattcccagcaacaacatgttggctcacaaccatccgttatgagatctggtgccctcttctggcttgcaggcatatatgcagacagaacacaatacataactaaataaatattaaaatcaacagtgagtataaaatataactcatctacataagacaacattatagattggttataatgctttgtatacaagcatgttcaggtatttttagatgactttcaaagttccgagtaatattaggttattcaaaaaagaaatgctgaagatttcatataaatgacaacctttcctctctccctttctttccttcatttatctgaaactaggtctggctccatgtagcccaggttgaactcactcaccatcctcctgcctcagcttccccagtactgcgattgcaggcacacatcaccacacttggacagaaaatagttcttaactaactacaatagtaacttcagaacctaatggtttgtttggttcgtatttcctcactatcacacattcaacacaaggaaacacagacacactcacacaattccaaggttacctttctcctcactgaaaaagaaatggacacatataagacataagaaagtagggctggagagatggctcagaggttaggagcactgactactctttcagaggtcctgagttcaattcccagcaaccacatggtggctcacaactatccgttatgagatctggtgccctcttctggtatgcagatatacatggaagcagaatgcagaatgttgtatacataataaataaactcttaaaaaaaaaaagacataagaaagtaactaaacccagataatatcctggaagatcagaagagtgattaatgttggctacaatagctgtacagagtttcaggtacctggacctagaatagatatttctgagtatattacaaatgaggaaacagagaagaagctcagtatgctttgaaaagtccttgtgaaaggcagggaaaaaagagcagggagagtagagttcccagagtagagttcccacaggtaacaccagatcatgaaggacctattctgggtggctcaaaggccactgagcttgccagaagagtggcctttgaaatctagcaattagctatagaaggattgacaactgcagtgaactgtaggctgacagatacaatgagctgtaactgacagacagacacagtgagctgtagactggctgacaagtgcagtgagctaagaaagaatgacaaagaaaaaaatgcttgctggaggtatgagtttgctttgttttgttttgttttttccttttttaacatggaaatgaaaggaaaacacaacagatgtaaacaaagttaaatattctgactgagtgcactgcagacctgtcaaacatgaaggcatacagaaggctgctcatgaagtcaagggaagacttgttcaagaactgtcctttaagttatctttcatgacgtccttacagccttgaataaacattcttgaaaagtttaaatatcgccaaataagtgatgaggagaaaaactgaaggcagaacaagctaagcaaaggcacgctttcctgccacagaaagatacttaaaaggctaaaaagaagctgagcagtggaggtgcacgccttaactcccagcataagaaggcagaggcaagtggatctctatgagttcaaggccaggggggatctgcaaagtgagttccagggcagccaggacacagagaaatccagtcataaaaaaaaaaaaaaaaaaaaaaaaaaaaaaaaaaaaaaaaaacgacaacaacaaaaaaggctaaaaagaaaatgttaaactcagtcacccaggatgctctctcaaatttgcttttacaattctttatgtttttcgaaatacatttctaaactgtttaattctgactcattcttacccaacacaaatacagccttgaagtatccactccatagagacattctccaataccttttccctagaaggtctagcttatttccacagcatcaagtgaggatgatttccacatctgtctcaaccctgttgttactgtgctgcagtaactcagcagcttccatctgcccccaactcgtttccacactactctccatcccaggagaggagctgcatcaacagggctcacatagcttcagactgagcttttcagtggaggggctttgcagggggactagaggagagcaaggttagaggacttaatccctggctcccttgctatggcactgctatctaactaggtacatcctttgatcaggggcccacattttcccaaggtgattccttttccagggcaactgcttccacatctgagtggctaaggaatccctcccctgagcgctggagcccagaatagaatcatctctgttacagagtgctggagaactgccctccttcccctcctttgcactatgcttactttccttcactaaaaccacccagaaattagcctaatttgagtatgccatttcctttgtgatggaaccctggctattcctttatgcatctgtaaaaacctaaatattccttcttagttcatttaaactcaaaatcaatgttactattgacaaaatcatctgcttctcaagacagttctttcctttcatgaacctctacaggatgtcacggtctcttactgtcttaatgtgggtgacagttttggtgaatatgcccctccttgtcttcaggttagaatggacatgggatggtgtttatgtagccctctgttcctatggccactactttaatatttcttaaatcacccttcaagtcacaacagccagacttcctgcctctagtcccaacaatttctacttaaatagcatttgtttgtttatgtatggtacttcattcagattgaacataaggccttgggtactagataagcactttacctctaggccacatcccagtctatatttagaatctgccctctatccatggtactgcttcctgcataagagcctctaagtcttgtgcctgctttatctgcttaattactaactcttaacattcaataaaacttattttgtatctatttattttactgtgaacatgaaaaactatattgtcaaatatctgtaaagaatccaataaactactggctcccgtcacatccagctgtgagcaggcccggtgctgggtaagtgcacagccctgtgagttatttcatgcctcctgagacaagctcaccctccacagctcactgctgcttttaaaggctcttagtgatgactgatctgaagcatcctcgccgcaatgtatcagcaggttaggttaatacatctctttacaacttctacagaacatcattttccttcgatatttaagaggaagttggtatcacccctaagctctgagaggaaaacacagccttctaaaaaaagataaacgacatagacaataactactatcaaaatgagaatcctcggacatacaaagtaatgaagggctaggatcctagcactcctgcctgcttaacaatgaggacagtgtttctggcacggatatgtacaggggaataaaagaagaaaaacttcagtgtgaccaccagagcttatagaacaagataaactattattttatgctgacaaaatgtgaattataaaccaggtgtagttgcacacaactttaatcacaaacactcaggaggcagaggtagttggagatctgtgacttcaaggctaggaggtctacataccctgcctcaaaaaacaaacaaacaaacaaaaaagacacacacacacacacacacacacacacactatagtttaaaacaagtctaggaaatatttcctaaaatttcacaaggaaatcctattcatatatatttttaattgtatgtgttcctgtatttgctcatggtatgtatgtgcatgcattcacatgccagggtgcatgcacatctgaggtcaaaggacaactgtgaggagccagttctttccttcaactcagcagaggtccttgggatcaaacatgttgccaggcttgcaaagcaagcccgaataaccactgagccttctcaccagcccttcattctagtcttaattccctcagttcatcaaataaaaactgagacatcgtattcctttccttttcatctcagtcagtttctttttaagcaagtttagaaattcatttataaacttaacatcacaaggaatgaccctcccatcctaatccatcaccaaatggaaatatagactcggctaagcaatggcaacccttactcatctgtatattacaaatataagaagtaaacccacttaaagtgtgtggctttcttaaaaaaagaaacaaaataaagtttgaatttgctaatattaactatttgggggaatgaggtaggtacataaaacaaaaattaacctatggactattaattatccttgtagagtcatttttaaaattcatgttcaagaatggaactacatgtaaaatgaagtcttgaggtactttttacattattagaaatatgtaagtgatttgtctaacatttccaaggaaatgcttaagaaatatcaatctgaagaatagtactgacaatgggtttggtagaacagaagcaggaaggttgtaccaagttcaagacctgccaagggtcccagagagaccctcaatataaaatagtattaaatactttaaaaaccacttgtcaaaaacaattacaatatatggttataaaggcataacagagtcattacaatacaaaagtaacggtttttttctccacatgggtcatactaggcccaggctggccctcaatccacaacctctggaggttaatctggggctgtgaagtagccggaagacacacgtgcaccacggccagctccaatcctccttttcaatatcagtcactaacatctgtcctgagaatggagccacactcgatgccgtaactgggttacattcatttcttactcaaaactgttctacatgaattactttattattagttatacaatagtatttgtcaacctgctctggcattcaaatacactaaatgtcctaatatatctacttatgcaaatcctgcactgttgttttcattttttaaagtttccaacttgatgccaaaaatcaatcgtttttagttgttttttgttttgttgtgttgtttagacttttgagacagaatctctctatgtagctcttgatggcctggaacttgatatgtagaccaggctggcctcaaactcaacagatagatctgcctgcctctgccctgcaagtgctgggattaaaggtgtgcagcaccaccatgcctaaccccaaaattatctagaaatttaaaacaagctctctttttgtacattcagcttaagctatcatatttttttactgtgcaattagtgttttatctggttataatggcataacagaattactacaatatctactccaaaatgtcattgtatttagtacttttacttcttttacctcgataagaaaactcaggtctagagatgacagtgcgctgcctgctcttccagaagacccaggttgaagtcccagtactcacataccagctcacaactatctgtaatgtgggcatccatcaatcccaaagcatccaatgcccacttctagcctctgcaggcaccgggcatacatgtgatacacaaatacacatgcaggcaaaatatccatacacatacaatttaataatgataataacattaaaaaaaaaaaaaaagaggaacccggcagtggtggtacacacctttgatcccagcactagggaagcagaggcaggcagatgtctgtgagttcaaggccagcatggtctacaaagcgagttctagaacaggctccaaagttatacagagaagccttgtctcggggaaaaagaagaaagaaaggggggggagggaggaatggagggagggagggagggagggagagagggagggaggaaggaaggaaggaaggaaggaaggaaggaaggaaggaaggaaggaagggagaaagaaacaagtgttacctacaagaacaaggcaccactgcagactacagtcacgatgtcagataaagcaatgcgcacttcacctgagttctgctagcacatgatcttgctcagaaaatcaaggcagcttctaatctttaagctcaaaaaacacatgaaactgaagaaccaaatgagtctagaagttagcagtacttagaagacaccatcaggcctcacagaaacaaaacacaaagagtcaaaacttagctggaagtttgaaaaaaaaaaaaagcctaaatatttaagaaattttcagacagtgagacggctcaatgtgtaaaagcactaatgacctctgagttccctccctggaacccacgtggtggaaggacagaactgattcctactagttgtcctctgatctacacacatacacacacacacacacacacacacacacacacacacacacacattcactaagattgtaaccagtaattgatttttaaaagaacattaacagattgtgataatttttattactatgtaagtcactaaaatgatatagggaaaatattttcttcatggtcatagcaataaaaaaaagaaaaaaaaaagattgctctaagaattgcacacactaacccccaaatacacagatagctaacaaaatacaagctgatggaaacaacaagatgttaaagaagacagaaaattaagaggaatctgacaggcaaagttgcttcaaattgaagagagaaaaaaaaatgacactgctgcagcaatgctgacctttaggaaggctcaatcattggggggggaggtactatccttgtttggttttttattagaaaatatcactcgagtactaacccactaacttctataattaatgagtatttgtagtcccagaaaaaaaataaataaaacaacttctgtgtcagataccaaagaactgtaatgtaagactctattatatttatataaactctcttaaacgaagattttagaccagtttccagcctatgataataaatattttaaaataggttcttcagtataagatttcccagcaatagtaatactgaaacttacagaatgagttttggggctagagaaatggctcagcagttaagagcactggatgttcattcatccagaggacctgggttggcttcccagcacccacttgatggttcacaaccacctggaactccagctccagagaatctgacatcctcttctggccaccattggcattgcacacacttggtgcagacatacaagcaggtaaagcacccttacacataaaatacataattttttaaaataaaaaatttgtaggtgaaaaacactttttgccatgtctacctgtttctgaattctcggtctcaacttcttgttcttccgccacatcctgcatcatgtaagtctcatcgtcatacaccagaacctgggcagcgtagccctgctctaatcttgcactggggactggctccacaatcactgctggatattcagggacattgtcacctccctacaaaagcaaatttaaagaacaatcaagctttttgttggaaaattctggatttagttctgaattttggttcacaaaatcccattaagtccacacagtgtatttcaagaatacatacatgaatgtagaaaaacaaggaaatggtaaggctggctgtgataatcttcaagtcttaagagaagatgaagtaagtaagagaagaagggcttttggataaaacacctgtacttcacttttttgtgaaagctcactaaaacaaaggtaagacactttgttctatgttttacactaaggaagacactgaaacaaacaaaaagagacaagagcaacacaccctgaggagaatgaaaggtgtgtgaacaagtatcaaatgggtacctaagagcgccaaatcatagcctaacagcaaacaacccaagatcagcacaccgcacagtggcaaggccacagacagtgccagacacttttgttcaaaaagagcatccacagaagctggggagagcaccttgagtcaatcaaagtataaaacatgtgtcagacaagaagttcttcttttgttttattatagtgccaggatcaaactcatagccttgagtcattaaaaaaaaatgctgggtggtagcatacacctttagtccgagcacttgggaggcagaggcaggcagacctctgtgaattagaggccagtttcctctacagagcaagttccaagaaaaccagagctgttagacagagaaaccctgcctcaaaaaagcaaacaacaaaaaataaacaaaacattaaattaaagaagagtttgagctacaagacagagtcaatctaacaaaaaggaagacaacaggaattttcaggaagacagaagataatcataaaagtaaactggtccgttttgcatcaatgtgttttattaatcttgactgtcaacctaactaaattgggagacatgtaaaagactattaataaagctcatgcctactgtctgtgcacattcttaaccctttgatggatttacactttgaatagactacagaggaactggaaggaggtatggcactgcagaggatcagtgtcagtggagacacaccattgattactaataccacttggtcctggctcctgtctgaaactcctctgcttcccagccaccaagagacaaacagctctgctatgtcataccttaaaccataacattccacctccccacaggatgctgtgaatgactggaaaggctcactatgtaaaatgtaaagggttgtatgtgaaatatctcctgtgacacaatgagttgttaaaaaccagtgacattcttcctgaagacacaacacctgggaaagtctgttccagcctgttatccatgtttgtttgcctcaccctaataatgtactctttctaccttgccctgatgtctgagaggagtgatcaacttctctgaactgagaaaaccaccactatcctatgcacagaaacaatagaacagaacctgatatctgactatctgctgaacagacaacagcagaaccatgctgaagcactttgtcaaaagctcaggatgacccaaagacctcagcaagagctcagaatgaccaaagacctcagcaagagctcaggatggcccaaagacctcagcaagagctcaggatgacccaaagacctctgcaagtgctcagaatggcccaaagacctcagcaagagctcaggatgacccaaagacctctgcaagtgctcagaatgacccaaagacctcagcaagagctcaggatgacccaaagacctcagcaagagctcaggatgacccaaagacctcagcaagagctcaggatgatgcaatgatctgagcaagagctcaggatgacccaaggacctcaacaagagctcagatgaccttttgacctcagcaagagctcaggatgacctaatgacatcagcaagagctcaggatgatccaatgacctcagcaagagctcaggatgacccgatgacctaaggagctcctatccagctacttctccgagaagctctgtgatggtataactcagcctgaaacgaagtcatattttacaaaacaaataataaactgcttaagagtattttcataaataataaaaccctaaagaaaggtacaaaaatgacaacacatatgaggatggcacctctgaaaacaaagatgggatatagaggaggggcacagtctgtatactctaaaacatttgaaattttagcccaaaatggtgatatatatatatatatatgcacctataacactagcacttggaggtggaggaagaaggataaggaggtcaaagtcatcctcagctacacattacattcaagaccaccccggactacatgagaccgtatctcaaaaataaatggatgaatcaatgaatcaatgactgaaatactagcagttactccacctcaacctgaatgataagtaatatggtttacatttttgtttttttttttttttggagacaggatttctctgtatgtagttctggctgtcctggaactaattctatagaccaggctggcctcaaactcagagatccacccgcctctgcctcctgagtgctgggactagaggtgtgtgctgccaccaccacccagctttatcagttaatcttaaaatatgcatgtactttatttgtgcttcattgtctataatacatttcaccaaaaatttaacttgcaaaatacactgcaaaaaaatttttttggctaacaatttctctatttcagaaaagactataagtccagctttttaacatcaaggtatgggggtatgcaaaaaaatcgctgctccacaactggacaaacagctatatcttcagcacttctagctgcacagtcacaacaacatcccctgactgtaaagcagatgctatggagaagcatgggccaagtgaagacgcaagttttctatttgccaaaactaaagagcaacatgctaagtagcactgaactgatgctgacccaagcactggttgtttatacatggagttaacaaattatttccttcctctaaatttatacaatagtcttttcattcagagaacagtcacactatgttgctcaggctggtctcaaaacttctggacttaagcaatcctcctccaaatagctgagtctacaagtacatgccaatggtctcaactatacaattttagaagcaaatttagcaccagatggcagagacaggcaggtctctcagggctatatagtaagacttgtctaaaacaaaaaaaattcttaaatccctggattaacctggattccagtaccttaccaaaactattttcgaattatcaataatggagggtggcaagatgccttggacctgcctcaacaagatgatgggccaaacttagtagacttcctaggggccttaccctctccaagaagcagatgggggggggggagtaggggagcaggaagagaggaaggggaactgggattggaatgtaaaaaataaaaaatacatatactcataaaaaaaatcagtaatgaacatcctgctcccccattttcctagccctggccatgtccagtctgcttccttttctctctgctctagactcttccagtcgcctctggatgttctctcttctcttcccccaatggatcagtcattccggcaatttctttattgggcccctcacatacaatctcaactttgcagcaagcccactgcctcagcgcctcaagtgatgggatcacagacacgcctcagtatgtccggattacaattttaaattttcaaatctcagacaaatagtatttaacaagcttgaaaatgtctactgcactgaatcaggtcattttacctcacatacagacactcccatatgcacacagacacacacttttaaggtcctctttggcagagttgtgttaagaaatgtagtcaagggagctagagagaggaatcagcaactgggaggaataatgttcttgcaggggacccatgttctgttcccagaacccacatcagacatttataaccacctgcaatccagctccaggatttgaatgagtcttcacaagcacctgaacaggatttacacacacacacacacacacacacacacacacacacataaatttttttaattgaaaataaatctttaatcaagccaaacataacatacagcagggcatctagactaacatgtagccctgtctgtgctcttaaacatcaaccagtatctcctcctcttgtttccggcacccactttccttactactgaagttcaccctgagtcctcttcatcaccactgaatacacactgcccagttcaaagctctcttctgagcattttcactttaaccctttccctccttaggcaacaccagccgctttcatcatttcactagcacctctatactgctgagagttatcaagtccctgtccttcattcaaccatatgctcaacttctcaacctagccattttcaacttaccctaaaatataaaactaacatcttaaaataaattatcaatctcttccttttctcccattttgcttttctctaaacctgttgcttcatattcagataataagtcataatactatgtcgttagttccttgaaaatcaagtattcgaggagcacttggcacagtgcatatcacaggaagaagcagttactggcccaggctgtcattctacaacagcagtaatggtcttcatatctattttggaggcacattgtcactcacaattggaactgtcacttttttctttgcacaaaaatctgtaatgatcctgtatttgtctaaaaggttaaaacacaacaattttcacacttgttatgggttgaattatgtcttcttatgtattgatgtatattttcaccccactgcccgtgactatgaccttatttgggaatgggtctttgcagatgtttgagttaagatatgatcagtaggacataccctagcccaatctgaccagtctttatagaaaaggacaacttggacactcagtgaaggtagagggaaaaccactgaagacacagaatgctacctccacaccaagcagagtgtgaagctgcacaagctaccggcgcataaggcagatgctcacagctctcagaagatgacaacacagccaatttctggattctagaactgtgagactataattttgttttgtgacaccactgagcttatgggatgttttacagcagccccatcagactaacctaccacctttaccacctttactggcttttttgctgacataactacatacaagatgtgtgacttagttcctatatgaaaaccttcccataatttctactgcccaaatagctttcctaaaggcttttcatcccattctagggagtcctttttaagcccccaaaaggtatttttctattcaaagtccttctgacacaagttatttgcctaatattaatgttacttacggcattctattataattaaatatttacatattcaaatccttgactggacagtgagattattagatagcaaaagttacacttaagtccttgaagatccacacatcacatgatgaagaatttaagtacttgctgatgagttcagagaacacaacatgatagattccacctttatctgacagcaagtaacttcatgagttttgtactaccaaatgatggagaacagaggtaccaagtacagatatgcagaattttatttagagattattttttactggagaaaaatgaggcagagtaataacacatcgactatcttcttaggattactttaaccaagatactagagtatgcatgattaaaatagatgaaccccaaaatcagtgggtcttgacacaacctagctagttctctataggctagggttgccagatttatcgaagaaaaacataggatacctaattagggctaaattcaattaaacacacatatgaacaatccacgtttggggaactgttacttatctgaaattcaggcctaactggctttcctgcatggtggagggggctgcaggtacacatacaggcttatgtgtgtgcacatgcttgtggaggccagaagtccacactggggggtctttatccatcttcacctgatttgtgtttgtgtatctgtgtatgcacacacatggaggtcagaggacaatgttggtccctgctcttttgtaattcaggaaaccttctgtgtctgaccccaatctcaccacagaaacaggattacagacacacaaatctgtgcctggctctatgtgggatctgaggattcagattcagggcctcactcaagcttgcatgctacaaggtctacccctgccccatatctccagcccctgcctcctcactttctgagacagggtctcccactgaacctagagctaacatcaaggtccatcaagcactttacccagtgagctgtcaccaggcaactgtactgtaagttctaacagtgccctcaaaacctctgagatccacctgcccctgcctcccagagctgagagtaatggaatacggctcaacagtggataagaaatcttgtgttcagatttaattgcttctaatggacttcacccaagtaatacggtcacttgaagtatgcaatccttggattctcataaacatagttatctctgtaaccacaacagtcaacagaatactcaaaatctcccctggtacccttatcataatcaccaacctatacctctggatctccagccctacatttcttttctgaagttttctaaagttcattttacatgcagtgtacccatgcgcccacatgcacgcacacacaccattgtgcacaaggaagtcagaggacaacttgagagagctggttctcaccccctatggaggtcccagagacacagtcagaaagcacctttacctgccgagccaccttattagtctataccttttctaaaactgtatatggaaatcaataaattgtgttttctgtgctgatgtctacacatgctctggctcagtcttgacccacaagcatgaggatccgaatttagatccccagcatccaaatggtgacctgcctgtagccccagggttcaagaggcagatggtatccagggacaagctagctgaactggaaactctacactcaagtgagagaccacgcctcaaatataaggtggagtctatcagacaagatgacaatctacacttaattttaaaagactgtcaaattattttccaaaatggttcttagaacattcccactagaaatgtatgagcattccaagtgctcaccctttccaacatgtggtaccacggtgcaagcagcaccattccagtgtgcggcacgatcttagccatttgaatatgcattttttgatggccaaaaatgctgaacagttctttgtttattagccattcatacaattattcaaagacaggagacagaggacgaaggaaaaggggaagggaacaagggagaggaggaggggatatctgccctagagggacaaaggactgcctctaagtaaaggagacagactgaccatcttttttattttttaggtgtgcacacacagacatgggccagggtctttccctaaacctggagctcatgttttcccagctttctctggaagccaacacatcccagtgagcctcctgtctgcacctccctcagagctggggttacaagcatatgtgctagacacagtacgtgggtgttgggggctgaacacaggtccttgtgattacacagcaacttcccagtccttcttcctattttaataggacacctttgtcttactgttttttatattctgaagatgtttgtggcttcaataaggtttcagtgcatcctcaaaggttcaagtaatggaagcttggtcctcagtgtggcaacatcaagaggtagaaagactgtgtgacagtggagtctgctggaatgttttcatatcattaagagtgccactcttggggctggagagacagctcagcagttaagagcactgactgctcttccagaggtcctgagttcaattcccagcaaccacacagtgactcataatcatctgtaatgagatctggtgccctcttctggcctgcaagcagacatgcaggcagaacgctgtatacacaataaagaaaccataaaaaaaaaaaaaaaagaatgccactcttgaaaaggagtgaagtagttctgtgtgacacaatggaattataaacaataagcctttgcaggcggtggtggtgcacacctttaattccatcactgggattaaagtacaggtggatctgtgacttcaaggttagcccactctacagagtgatttccaggacagcccgaactacacacagagtagtgtgtcacaaataaataaataaataaatgaggaaaatatttatgttgtaaatattcttctgttccattcactgggtctccttttcacatttttttttttaactttttcaaggcagagtttcgttctgtaacagcctggctgtcctggaattcactctgtagaccaggctggcctcgaactcacaagagttccacctgcctctgcctcccaagttctggattaaaggtgtttgccatcacctccagaactattaagttttaggttttgttgatacagtcatactatgtgatcaacactagccctcaagttcttgcctcagcttcccaagagatgtaactacagtcttgcatcatatccataagtttctatttttattgtttttacacatatgattagggttaaatttatcatattgttctttgcttactgtcctaaatattttaagttccaactttcttgccttagatacatgtttttacttcaatttctcagtgattgctttatattttacaccatgcttttttttaaattcatcaatatatattatatggctttatgtttaatataaagatctcataacagtattactctaattctctactgacattatttgttctgctgtgatgcatttactgccatgcattttcttcatattataaattgcacaataacttttatttctgctgattttacatgctgggtataataacacacacctttaatcccagcactccagaggcagggacaggtggatctctgtgagttcaaggccagccagggatatgcagtgagacactatctcaaaaaaaaaaaaaaaaaggatttcatataccttaacacattacatattgtttaccatgagccttatttttcaaaataaaattttggtttacctcatagtaaccatttctccaggcctcttcactttgcatagaaccaagtttctagatagaataattaactttctgcctaaaaaatgtatttgtaatatttcacagtgcaagcatattgtctctcagcctttgtctggggtaaaaactcattttgatgttgttttattactattacatttatgtgagtgtgccatgcactcatggtgcagatgcagaagtcatagtacaatctgcagaggttggttctttccttccaccctgtgggtcccagaattggacccaggccatgaggtttagtgatccaatgggccatcccaccaacacaggtatttatttttactagatgtgtaactaaaaactgagagttttaccctctcagcatttttttaaagatttatttttactttatgtgtatatgggttttgcttgaatgtatgttttcattccaggtatgtacctagtgttctgggatgccagacaggggcacttgatcctgtgggactgttatggatgcttgtgagccaccacgcaggtgctaagaaccttacccaggtcctctgcaggagcagccagagctcttaaccccagcatttcctcagtatcttgaaggttctgttgtcctctgcaatgctcatcttcattttgtactgactgagcttcacctttggctgctcactgccgggcagtggtggtgcaagcctttaatctcagcactcaggaggcagaggcaggcagatctgtgagttcatggccagcctggtctacaaagcgagttccaggacagccagagctgtatagtgagaccctgttccaaaaaaagaaaaaccataaaaccaaaaaacaaaacagaaaataagtattatggagaacagttatgtatagattgttttttttcagggaggtgagcagtatccggggatctagcatggtcttgcactggcttgacatctacaacccaaggccctgaaccaatttttaaggtccatttttaaaacttttcatggtagacttcaactatctttaattctagagctaatttagccctgctatgtaagacacaacccttatgacggtttttagccgggcattggtggcattcgcctttaatcccagcactcgggaggcagaggcaggtggatctctgtgagttcgaggccagcctggtctccagagcaagtgccaggataggctccaaagctacagagaaaccctgtctggaaaaaccaaaaaacaaaaacaaaaacaaaaaacaaaaaacaaaaaaccttatgacggtttttaatgaatgccctgagctttcaacaaggactctcttgcccggctgactggaatgccagtatctaccagcacaaggactgagtcctgcctttctggccaagtctttcttggcttcatggagtccgagttgcctaaaccactgagtgttccagccagtcaatgggagccccggcaatacatacagctctttctttgggaagggtgcttcttcgccttttggatagtatattcataagagttcatttgaacctctccaagatttgtttccttggttcaaggaagatagctactttgttttctattcctttttacttccaattgtttccctagtagcagatgtcatctagaaagttctattcaaagtttttaaaatatgacttaaccacataagcagaacttgtagccaacatgtaaatactttcaccatgagcaactgcaaacaaccagcacggcatcagtgaatgcagacctgggaggagaagacagctggctctcatcctggctgccggaagaaagctgccaactgcaggtaactgattccatgttttccacagaatttacctgtctttctattcctgcctctcagcactatagaatgcaactaaatagcacacacatttcttataaaggctctaatttaaattttcaaaacttaggggctaaagagttggctccatggttaagagcattgtttgttcttgcaaaggacctggttcaaatcccagcacccacaactgtctgtaactccagtccctggggattggataccctcttctggtctctacatgcacagtgcacaaacatgcagacaaaacattcatacgtataaaacaggtgctggagctgaggctatgactcaggtgtcaggtatgcagtgagccctggactcatacccggctccacatgagtggtggtgcatgcctgttatctcagcactcaggaagtagaggcagaagaaccggaagcttcagatcatcctggctacacacagagatcaagaccagaccgatctacatgggaacctgtctcaaataacaaaaataaaaaccaaaactaaaatattttattccagtgtgtgcacatgaataacagcctaaactatactttttcttaaaaagattttatttatttattatgtatacagtcttctgcctgcatgccagaagagggcaccagatctcactcaaagtggttatgagccaccacgtggttgtcaggaattgaactcaggacctctggaagaacagtcagtgctcttaacctctgagacatctctccagctcctaaactatacttttaattttagagatttgtaaattacatttaattgtgtgtggtggggaggagttgtctatgtagaagtcagaggacaacctgccagtcaaatgtcaaatcccttctaccttgtatatccttggcattaaactcagtcatgaggcttggcaaaagcgcccttcaagctgggacatctcatcagctctgtaaaaacttggtgttagcagaaataaacgactattttacttctgttatcagcttttatgtgtataatagctagtaaactggcattctccacagcacagatcctcccatccatcccatccaagtgaaagtggaatttctttattaaaggtttggtgttttcttttgttttgctttttctgttgtttgttttgagatagtatctcaacattgttattcaagacactgattttgttttgttgtgtcctgagttctttcaagacagggtttctctatgtagccctagctatactggaattcactctgtagacaaggctggccttgaactcagagatttgcctgcctctgcctcctgaacgcatttgatttttgagatagtgtgtcattatttgagtgtctctggatttgaactcatgagcctcctgcctcagccttcaaatgctgggattacagacgtgcgttaacacatctgacttttaaagtcttatcagcagatagcttgttacaactgttaagtaagaaattttatcaaaaatgtagatggacatttataaaatcccattttactaagaatcttctctcagagccagagaaattgctcagcacttaaaaatcacttgctggctggtcagtggtggctgtacacacctttaatcccagtactagggaggcagaggcagtaagatctctatgagttagaggccagcaacatctacaaagtgagttgcaggacagccagagctgttacacagaaaaacccgtctcgaaaaaaacaaacaaaactatttgattcatattaagtattgattaacatttgttaaaaggatagaggaatagatgtgaaagttgaacagcaagttgttcccacactggtaccacagcatttcaaatacccactaagtacactggcttcttctgacctccttccataaaatataactacccttttataccacataaaccattattagtaacaatttgataaattcataatgtttttcctccgtgctaagttctaaccaggaatccctgtgattccatgtgaaggaggaaaaactaaaggaggctccagacaaaccttggtcctcttttccccatactgctttttttttttttaacagtaaaatgtaaactactctgaagtacactcttcatggcagttctcctcacaagataaaaacaccatcactacaaagttatagaagacagaaaaataatttgaaagagaaacaccatgtgctgggtactatcaaatgagagagagagccttcatctctgttgactcatacccagaggtgatatacagaaagtgaattgggcttttgttttgttttgtttttgagacagggtttctctgtgtaacagccccagctgtcctggaactcactttgtagaccagacttgccttgaatttagagatctgacttcctctacctcccaagtgctgggattaaagatgtacaccaccacccaactaagaaagtgaatcttagaggaagaagctgactttggaagtatgttctactgtggtggctttttctaatggactctgcatgcatttaagaagcagtctttaaatacaaagggaacatgtaggaatttgcaagcccactgacggtagaaaagtacatcctataaacatgcccacagcagatctgagtcttacagactgaacagacaccaagcaagcaaggaaaataatccagaccacagaacacacactagtgtgtcctcactgtcatcaggcatctccctgttccattatcctggcaccaaccccagtgacagtagcatctttcacagagagaaaagaaacttccatgatactgaaaactgtccattttcccaaggtgtctctaaccaaacatccacatgacagcactgctataattttgtttgatatccacattcagtcccaaacgaatggtaggaatagaaaccaagactcaaaatctgtttcctgttcccaactcttattcttccgagttttctttctgtgacaagaaaatgaccagatacactgaagactcaaaatcctaccttcaatttcgaattatataaacaattgcacatattagatctgaattagacataacagaacaagaaagaaagatgatacagaaagcaaagataagcttctaacttaagatgacagcaatttaggtatttagatacaatgtatttctcattctccattatctaagaaaatgggcaatatcagaaacttaattttttgtttccagtcagaatttctctgtgtagccctggctattctggaactttctctgtagatcagcctggcctcaaactcacagaaatcccgccaagttctgggattaaaggcatgtgccaccaccacccagccagaagattaacttttatctaaactaacataacatcattctttccatctctttgcttcctccaaatccatcctaatatacacatcttatatcacccaggtgagcaaccttctcacccctactaagttacatgaaaatacatggacaattttctgcatggtacatttctactctcaaatacctgttttgtcattcatttcaagattaattcatgtactgatttctatgatttctattaacaaaaccgagatgaaatacattaaattcctaacctcttgattctctactccattgctggaaagctccagaacagaacctccactgtcaaccactgccgatgtcattgtttattccctgaggaagttgtgtatggctggaaagctccaaaacagaccctccactgtcaaccactgccgatgtcattgtttattccctgaggaagtttcaaatgctatgaatcagtgtaattaggactcatagatgatggccagggttataggtttcattttcatggtttaattcaatagagatggagtagattagacatccagaagtccagtcttctaaagttgattaaccagagggtctaaaaagagcaagaattggaattgttaagaatatataggaaagagagaaagcaatttaatatttaacattgtttaattaaaaaggatataggctacttaagagcttaatattcaaattcattaactggtcaaacaatattttactaagctattgtatatgggtattatattataaaagatataatgctaaaatttccttgggccagagacattcctcagcagttaagaacactggctgctcttccatgtttgattcccagcacccatatggcagctcattaccatctataactacaattccaggggatccagcaccctcttctggcctccacaccaggcacacacatggtacacagacatacatgcaggcaaaacacccatacacaatgttagcactcctctcttatggagatgcaatattatacatggaatattttaacagattttgttatttgagacagggtttctctgtgtagccctgtctgtcctggaactctctctgtagatcaggctgtctcaaactcacaaagatccacctgcctctgcctcctgagtgctgggatttttattttaatatgggctggagacatagttcattagttaagagtgatgagtttggctgagcggtggcacatacctttaatcccagaacttggaaggcagagacaggaggatttttgagtttgaagccagcctggcctacagagtgagttcgaggacagccatggctacacagagagacactatcttgaaaaaccaaaaagaaaataataagagtgatgagttaactaaagaatagtggcacacacctttaatcacagcactccaatccaatgctctcttctcccttccgttgacacctgtgatcacaatacatactctcacacagacacacacatgtaattaaaaataaatctttatttgtaacgatttatttattatgtatgcaatgttctgtctgcatgtatgcctgcaggccagcagagggcactgggtttcatgatagatggttgtgagaaattgaactcaagacctctggaagagcagccagtgctcttcttaacctctgagctctctctctagcccaaaataaatcttttttaaagaaacttttaaactcttttaaaccctgcacacattggagctaaacttgtgttgtagggattacacagctgctgcttttagaaacatctccctagaggggcttcttaagtctttttcttcctcctgctccttctttcttaaaatgtatttattttatgtgcatttgtgtgttagcctgcatgtatgtctgtatgagatatccgaatccctggaacttgagttacagacagttatgagctaccatatgggtgctgggaattgaacctagatcctctggaagaacagccaatgcttttaacctgtgagtcatctctccaatccctctctcttcttatgaagatggattattaatgtgtcttatctacatttaatccttacgttactttttatttgattttgtgttgtatttcatacagagaaaatacaaacctttctgacaggattttcttttcttttctttaatcctggttttttcaaagcagggtttctctgtggctttggaggctgtcctggaactagctcttgtagaccaggctggcctaatactcacagagatccacctgcctctgcctcccaagtgctgggattaaaggcgtgcgccaccaatgcctggcaggatttttttctaatgtcaaattttaaccatgcagaaaatttaaatacattgaaagaaatatatactttgccgggcagtggaataggaataaataataaggaatttctgtaaatgtttacacaaaaatgaaaaagtagaaactttatcttaaacatatttattttatttaatgtccacctgattatatgtatgagcaccacatatgtgcaaaagcatgcagaggccagaagagggcatcagatcccctggagttgccagctgccagatgtgtatgctaagaactgaacccaggtcccttgaaaagagcagcaagtattctccaggaccttctttttcatcttacacagaaagttaaataggaagtgtttatatcttaagaatattaaaggggctttcctatttatgagcacttggctgctcctccagaagcctgagttcaattcccagcacccacatggtggctcacaaccatctgtaatgagatctggtgcttttttctacatgcatatctgcatacatgcagcaggcagaatagtgtatacataatttttaaaaatctttaaaaaaagaaaaggaaaagaaattcaagaaagatccacaatcccatcacattaaagctcccttttacttttcctaaaacctgttttccaaacatatataaaaacaaaaataaactttacttacaatttgaatgttaagtagtctaagcatccttcattgttttcgcaactcgtcaagagctaaaatctaaaccagcagttctctggaactactagtggaaagaaaaaaaaagaaagcattaacataattttatttaaaacaaaacaaaacaaaaaaacattttgccttaaataagtatgactcgaacagtaaatacttaataaaacaaatcctctccagcgcagatggcacacatttacacaatgtaaattcacagatgactaaggaatcagaaactatttaaaaaatcagtgctgcaattttaagttaccactaaatgattaagaaaggtcagatccaacatacacagactatgctccgtgttatggagtatattacaattaaccaaaaggctttttagttatttttttaaagggggagagaatgcatcccctgaaactagagttacagaaggttctgaggcatcatgtatgctaagagtcaaacacaggtcctcttggaaatgttcttaactgctgaaccatctctgaagccccaaccaaaaggttctcagagcggtggtggcactgtgacttcttgtcctggctagttagctctatgtcaatttgacacaagctagtcactggacaggaaggatcctaaactgagaaaatgcctcagtaagatttgggcaggcttgtagagtatttccttaatgagtgactgatgtgggaaggcccagcccattgtggatttggccacccctgggcaggtagtcctgaattctgtaggaaagcacgctgagcaaggcaggggaagcaagccagtaagcagcacctctccatgtctctgcactacctccaggtgatgggggatgtccttctgtatatatatttctcttattggttgatgaatacaacactgattggccagtagccaggcaggaagtataggtggagctaccagatgagaattctggggagaggaagcagagagaggccaccagggagaccccatatagccgccaaaggactaacatgctggagtattctccagtaagccaaaaccacatggagatacacagattaatagaaatgggttaataattaagcagagctagtaaataagaagcctgagccgttagccaagcaatttataattaatataagtctctgtgtgcttatttggggctaaacagcagcaggaccagacaggacagaaactccgtttacatccaggttcctgtcctgtttgagttcctgtcctgacttccttcaatgatnnnnnnnnnnnnnnnnnnnnnnnnnnnnnnnnnnnnnnnnnnnnnnnnnnnnnnnnnnnnnnnnnnnnnnnnnnnnnnnnnnnnnnnnnnnnnnnnnnnnnnnnnnnnnnnnnnnnnnnnnnnnnnnnnnnnnnnnnnnnnnnnnnnnnnnnnnnnnnnnnnnnnnnnnnnnnnnnnnnnnnnnnnnnnnnnnnnnnnnnnnnnnnnnnnnnnnnnnnnnnnnnnnnnnnnnnnnnnnnnnnnnnnnnnnnnnnnnnnnnnnnnnnnnnnnnnnnnnnnnnnnnnnnnnnnnnnnnnnnnnnnnnnnnnnnnnnnnnnnnnnnnnnnnnnnnnnnnnnnnnnnnnnnnnnnnnnnnnnnnnnnnnnnnnnnnnnnnnnnnnnnnnnnnnnnnnnnnnnnnnnnnnnnnnnnnnnnnnnnnnnnnnnnnnnnnnnnnnnnnnnnnnnnnnnnnnnnnnnnnnnnnnnnnnnnnnnnnnnnnnnnnnnnnnnnnnnnnnnnnnnnnnnnnnnnnnnnnnnnnnnnnnnnnnnnnnnnnnnnnnnnnnnnnnnnnnnnnnnnnnnnnnnnnnnnnnnnnnnnnnnnnnnnnnnnnnnnnnnnnnnnnnnnnnnnnnnnnnnnnnnnnnnnnnnnnnnnnnnnnnnnnnnnnnnnnnnnnnnnnnnnnnnnnnnnnnnnnnnnnnnnnnnnnnnnnnnnnnnnnnnnnnnnnnnnnnnnnnnnnnnnnnnnnnnnnnnnnnnnnnnnnnnnnnnnnnnnnnnnnnnnnnnnnnnnnnnnnnnnnnnnnnnnnnnnnnnnnnnnnnnnnnnnnnnnnnnnnnnnnnnnnnnnnnnnnnnnnnnnnnnnnnnnnnnnnnnnnnnnnnnnnnnnnnnnnnnnnnnnnnnnnnnnnnnnnnnnnnnnnnnnnnnnnnnnnnnnnnnnnnnnnnnnnnnnnnnnnnnnnnnnnnnnnnnnnnnnnnnnnnnnnnnnnnnnnnnnnnnnnnnnnnnnnnnnnnnnnnnnnnnnnnnnnnnnnnnnnnnnnnnnnnnnnnnnnnnnnnnnnnnnnnnnnnnnnnnnnnnnnnnnnnnnnnnnnnnnnnnnnnnnnnnnnnnnnnnnnnnnnnnnnnnnnnnnnnnnnnnnnnnnnnnnnnnnnnnnnnnnnnnnnnnnnnnnnnnnnnnnnnnnnnnnnnnnnnnnnnnnnnnnnnnnnnnnnnnnnnnnnnnnnnnnnnnnnnnnnnnnnnnnnnnnnnnnnnnnnnnnnnnnnnnnnnnnnnnnnnnnnnnnnnnnnnnnnnnnnnnnnnnnnnnnnnnnnnnnnnnnnnnnnnnnnnnnnnnnnnnnnnnnnnnnnnnnnnnnnnnnnnnnnnnnnnnnnnnnnnnnnnnnnnnnnnnnnnnnnnnnnnnnnnnnnnnnnnnnnnnnnnnnnnnnnnnnnnnnnnnnnnnnnnnnnnnnnnnnnnnnnnnnnnnnnnnnnnnnnnnnnnnnnnnnnnnnnnnnnnnnnnnnnnnnnnnnnnnnnnnnnnnnnnnnnnnnnnnnnnnnnnnnnnnnnnnnnnnnnnnnnnnnnnnnnnnnnnnnnnnnnnnnnnnnnnnnnnnnnnnnnnnnnnnnnnnnnnnnnnnnnnnnnnnnnnnnnnnnnnnnnnnnnnnnnnnnnnnnnnnnnnnnnnnnnnnnnnnnnnnnnnnnnnnnnnnnnnnnnnnnnnnnnnnnnnnnnnnnnnnnnnnnnnnnnnnnnnnnnnnnnnnnnnnnnnnnnnnnnnnnnnnnnnnnnnnnnnnnnnnnnnnnnnnnnnnnnnnnnnnnnnnnnnnnnnnnnnnnnnnnnnnnnnnnnnnnnnnnnnnnnnnnnnnnnnnnnnnnnnnnnnnnnnnnnnnnnnnnnnnnnnnnnnnnnnnnnnnnnnnnnnnnnnnnnnnnnnnnnnnnnnnnnnnnnnnnnnnnnnnnnnnnnnnnnnnnnnnnnnnnnnnnnnnnnnnnnnnnnnnnnnnnnnnnnnnnnnnnnnnnnnnnnnnnnnnnnnnnnnnnnnnnnnnnnnnnnnnnnnnnnnnnnnnnnnnnnnnnnnnnnnnnnnnnnnnnnnnnnnnnnnnnnnnnnnnnnnnnnnnnnnnnnnnnnnnnnnnnnnnnnnnnnnnnnnnnnnnnnnnnnnnnnnnnnnnnnnnnnnnnnnnnnnnnnnnnnnnnnnnnnnnnnnnnnnnnnnnnnnnnnnnnnnnnnnnnnnnnnnnnnnnnnnnnnnnnnnnnnnnnnnnnnnnnnnnnnnnnnnnnnnnnnnnnnnnnnnnnnnnnnnnnnnnnnnnnnnnnnnnnnnnnnnnnnnnnnnnnnnnnnnnnnnnnnnnnnnnnnnnnnnnnnnnnnnnnnnnnnnnnnnnnnnnnnnnnnnnnnnnnnnnnnnnnnnnnnnnnnnnnnnnnnnnnnnnnnnnnnnnnnnnnnnnnnnnnnnnnnnnnnnnnnnnnnnnnnnnnnnnnnnnnnnnnnnnnnnnnnnnnnnnnnnnnnnnnnnnnnnnnnnnnnnnnnnnnnnnnnnnnnnnnnnnnnnnnnnnnnnnnnnnnnnnnnnnnnnnnnnnnnnnnnnnnnnnnnnnnnnnnnnnnnnnnnnnnnnnnnnnnnnnnnnnnnnnnnnnnnnnnnnnnnnnnnnnnnnnnnnnnnnnnnnnnnnnnnnnnnnnnnnnnnnnnnnnnnnnnnnnnnnnnnnnnnnnnnnnnnnnnnnnnnnnnnnnnnnnnnnnnnnnnnnnnnnnnnnnnnnnnnnnnnnnnnnnnnnnnnnnnnnnnnnnnnnnnnnnnnnnnnnnnnnnnnnnnnnnnnnnnnnnnnnnnnnnnnnnnnnnnnnnnnnnnnnnnnnnnnnnnnnnnnnnnnnnnnnnnnnnnnnnnnnnnnnnnnnnnnnnnnnnnnnnnnnnnnnnnnnnnnnnnnnnnnnnnnnnnnnnnnnnnnnnnnnnnnnnnnnnnnnnnnnnnnnnnnnnnnnnnnnnnnnnnnnnnnnnnnnnnnnnnnnnnnnnnnnnnnnnnnnnnnnnnnnnnnnnnnnnnnnnnnnnnnnnnnnnnnnnnnnnnnnnnnnnnnnnnnnnnnnnnnnnnnnnnnnnnnnnnnnnnnnnnnnnnnnnnnnnnnnnnnnnnnnnnnnnnnnnnnnnnnnnnnnnnnnnnnnnnnnnnnnnnnnnnnnnnnnnnnnnnnnnnnnnnnnnnnnnnnnnnnnnnnnnnnnnnnnnnnnnnnnnnnnnnnnnnnnnnnnnnnnnnnnnnnnnnnnnnnnnnnnnnnnnnnnnnnnnnnnnnnnnnnnnnnnnnnnnnnnnnnnnnnnnnnnnnnnnnnnnnnnnnnnnnnnnnnnnnnnnnnnnnnnnnnnnnnnnnnnnnnnnnnnnnnnnnnnnnnnnnnnnnnnnnnnnnnnnnnnnnnnnnnnnnnnnnnnnnnnnnnnnnnnnnnnnnnnnnnnnnnnnnnnnnnnnnnnnnnnnnnnnnnnnnnnnnnnnnnnnnnnnnnnnnnnnnnnnnnnnnnnnnnnnnnnnnnnnnnnnnnnnnnnnnnnnnnnnnnnnnnnnnnnnnnnnnnnnnnnnnnnnnnnnnnnnnnnnnnnnnnnnnnnnnnnnnnnnnnnnnnnnnnnnnnnnnnnnnnnnnnnnnnnnnnnnnnnnnnnnnnnnnnnnnnnnnnnnnnnnnnnnnnnnnnnnnnnnnnnnnnnnnnnnnnnnnnnnnnnnnnnnnnnnnnnnnnnnnnnnnnnnnnnnnnnnnnnnnnnnnnnnnnnnnnnnnnnnnnnnnnnnnnnnnnnnnnnnnnnnnnnnnnnnnnnnnnnnnnnnnnnnnnnnnnnnnnnnnnnnnnnnnnnnnnnnnnnnnnnnnnnnnnnnnnnnnnnnnnnnnnnnnnnnnnnnnnnnnnnnnnnnnnnnnnnnnnnnnnnnnnnnnnnnnnnnnnnnnnnnnnnnnnnnnnnnnnnnnnnnnnnnnnnnnnnnnnnnnnnnnnnnnnnnnnnnnnnnnnnnnnnnnnnnnnnnnnnnnnnnnnnnnnnnnnnnnnnnnnnnnnnnnnnnnnnnnnnnnnnnnnnnnnnnnnnnnnnnnnnnnnnnnnnnnnnnnnnnnnnnnnnnnnnnnnnnnnnnnnnnnnnnnnnnnnnnnnnnnnnnnnnnnnnnnnnnnnnnnnnnnnnnnnnnnnnnnnnnnnnnnnnnnnnnnnnnnnnnnnnnnnnnnnnnnnnnnnnnnnnnnnnnnnnnnnnnnnnnnnnnnnnnnnnnnnnnnnnnnnnnnnnnnnnnnnnnnnnnnnnnnnnnnnnnnnnnnnnnnnnnnnnnnnnnnnnnnnnnnnnnnnnnnnnnnnnnnnnnnnnnnnnnnnnnnnnnnnnnnnnnnnnnnnnnnnnnnnnnnnnnnnnnnnnnnnnnnnnnnnnnnnnnnnnnnnnnnnnnnnnnnnnnnnnnnnnnnnnnnnnnnnnnnnnnnnnnnnnnnnnnnnnnnnnnnnnnnnnnnnnnnnnnnnnnnnnnnnnnnnnnnnnnnnnnnnnnnnnnnnnnnnnnnnnnnnnnnnnnnnnnnnnnnnnnnnnnnnnnnnnnnnnnnnnnnnnnnnnnnnnnnnnnnnnnnnnnnnnnnnnnnnnnnnnnnnnnnnnnnnnnnnnnnnnnnnnnnnnnnnnnnnnnnnnnnnnnnnnnnnnnnnnnnnnnnnnnnnnnnnnnnnnnnnnnnnnnnnnnnnnnnnnnnnnnnnnnnnnnnnnnnnnnnnnnnnnnnnnnnnnnnnnnnnnnnnnnnnnnnnnnnnnnnnnnnnnnnnnnnnnnnnnnnnnnnnnnnnnnnnnnnnnnnnnnnnnnnnnnnnnnnnnnnnnnnnnnnnnnnnnnnnnnnnnnnnnnnnnnnnnnnnnnnnnnnnnnnnnnnnnnnnnnnnnnnnnnnnnnnnnnnnnnnnnnnnnnnnnnnnnnnnnnnnnnnnnnnnnnnnnnnnnnnnnnnnnnnnnnnnnnnnnnnnnnnnnnnnnnnnnnnnnnnnnnnnnnnnnnnnnnnnnnnnnnnnnnnnnnnnnnnnnnnnnnnnnnnnnnnnnnnnnnnnnnnnnnnnnnnnnnnnnnnnnnnnnnnnnnnnnnnnnnnnnnnnnnnnnnnnnnnnnnnnnnnnnnnnnnnnnnnnnnnnnnnnnnnnnnnnnnnnnnnnnnnnnnnnnnnnnnnnnnnnnnnnnnnnnnnnnnnnnnnnnnnnnnnnnnnnnnnnnnnnnnnnnnnnnnnnnnnnnnnnnnnnnnnnnnnnnnnnnnnnnnnnngaaaggcgggggaagcaagccagtaagcagcacctctccatgtctctgcactacctccaggtgatgggggatgtccttctgtatatatatttctcttattggttgatgaatacaacactgattggccagtagccaggcaggaagtataggtggagctaccagatgagaattctggggagaggaagcagagagaggccaccagggagaccccatatagccgccaaaggactaacatgctggagtattctccagtaagccaaaaccacatggagatacacagattaatagaaatgggttaatatttaagggagagctattcaataagaagccagagtcatgggtcagacagtttataattaatataaatttctctgtttatttgtggctaaatggatttgggaccaggcagaacatctataaattgacacactgaaacatgaaatttggagtcacctaaatctgtgtttccacatcatcatcacagtcctttcgtctccaactggctttttggtcatgatgtttcatcacagaaatagaaaccctaaataagacactcccctttggcagcaagaaataaagtttaaaaaacaaaactagggagctggagagatggctcaacagttaagagcactggcagctcttccagagggcctgggttcaattcccagcacccacatggcagctaacaactgtctgtaactccaagattttgacaccctcatatagacacatatgcaggcaaaacaccaatgcacataaaaaaaataaaataaattttaaaaactaaggctgggtgtgctcatgcacacctttaatcttattaaggtccataggcaggcagatctctatgagctcaggacagctaggattacatagttcaaaccctttcatagatagatagatagatagatagatagatagatagatagatagatagatagatagacaaaaaaatttaaggatgggtatggtggcccatgtctttttgttttgttttgttttgttttgttttgtttttggaagacagggtttctctgtatacgcctggttgtcctggaacttgctctttagaccaggctggcctagaactcagagatctgcctgcctctgctcccaaatcctggaaataaaggtgtgggctaccaccacccagaagcggctcattcctctttaatcccagcatccagaagccagccaggtctacacaactcagaccctttctcagaaacaaagaaatttttcaaaaaagccaatgaaccaagtaaactgaactcagagaaccacacaataacacaatatataatcatacttttaaaaacaacagacatggctggaaagatggctcagtggttgaaaactgtatatgaccaaggttcagtttacaacacatacatggcaactcacaggaatatgtaactacagttccagggatccaacaccatcttttttctggccttgtcaggcattgcatatacacactgcacatacatgcaggccaacattcatacatttatacttaaaaattataaatcctagcctggtggtggtgaaacatgcctttaatcctagcacccaggaggcagaggtagttggatctcagtgagttcaaagggcagcctgatctataaaatgagttccaggacaggctgctacacagagaaaccctgtctcgaaaaaccaaaataaataaatagataaacaaataagtgaaaataaataataaacctttaaaaattaaagacaaaaatacaaataaaaaataaataaaaattaaagacaaacttggaaacaagagaaatgatttgtcacacatgacagatcctcaaaaaaagtaccaggaaatatgtcatcagatttgtgatcacaagactagcaaagatattcaaagaactcaaagaaaaaacactgttgacaaagaacccttcatcatgcagaactgtccttcaaaagcagaggtacgaaaacgtcgtcagcaaatctaacagagttcatcactagtaagcagggccacacttcaggaactgctccagcgagccaacaagatagagcaggaggaccctggacctgaaggctctgtgaagaaatcagggccaggacacagaatgcagaacccgcactgtagtgaagtgctgctgcaaatggtttttattcacttttgtttttctgtgtgctttgagagactaacaaacttgttcaaaacatcttttgtcgaagagctaatatactactataaattccatttaactacaggttttatttttcatttaatttaatgagaaaattcattttaaaaattagtttgttttggagcacacatgcatgaaggcaaaaatcctgtggcatccaactgaaagagatggaggaatataaaggagtttttgtttttctggtgttggagactgaacacagggttttgtgcacaaggcaagtctaccactgagctagctctatcaccagcctagaagtagagggcttttggttttttattttatgtgtattggtattttgcctgaatgcatgtcttcgtgagggtatcatatcttggcgttacagaaagttgtaagctgccatgtggatggtgggaaatgaacccaggtcgtcttgaagagcagccagtgctcttaacagttggaccagctctccaggcccagacaagagtttttatgtcactaaaaatcacactgccaaaattcaagttactattcaaatcggattactacagattaaatgtaattccaatagcaaacagaaagaaaatagctataggatatataataggaaatcagaagcttgaagattctactaaaaaaaataattacatgcaaaaggaaacaatggtacaaaaaaaatgaaggcccaacattctgctgctgcatagacgatatgcaggaaaattactgaagtatctctttattactaaacactacaatcttgatggttactctaaagatttaatgagcacagagtcaagaggacaaaatcaacatgacatggctgccagtatttaccatcagagctcaagatgaagctactgcctggcttttagcccgcctaacctttcacatatgctcaaactctggggcagaagggctgagagtcaggaaaaatacatggagaaggtgcttgataatgtgaccccattacaagttaaagtttctcatttatttggtttggtttttttcaaaacagggtttctctgtagtggtagccgtcctggaacttactctgtacaccaggctgtcctggaactcagagatccacctgcctctgccgcccaagtgctgggattaaaggtgtgcaccacccagcaaaattaaagttttattcaaaatggtatttgatttttagtaaacttttttgatttttagataaagtttatggaaatttccagaagaaaacttatttttcctgttattccttataagaccaaacaccatttacatgaaatcctattatatacaacatttacccatcctctactaaaaagaagaaaaaaaaaatcctgctataaattaattctctagcctggaatgaaaagtcactacactacttttcctgtggctttctcaacacttggaaaaaaagaaataaacaaatgttccttcaaagctctttctcctcctgtggccagctgacctctgacctcacagtcccctcctacctgggctggctgatccaggcacagagcactcacacaattccccacaagcactgggttcttggggctcttgctcccctgcctggctcttccaaattataacaagatggacaacatttccttcactttccaccttctctcaacaccccttccccccaattacatttcatttacccgtagccctcttaccatcccctatttaaaatcatattttagattcattcactgtttaatgcctgtatcctcttccaaaatataaaacccatgagaacagtaaaataacggttacttcatctatgtccaaaaaacctaaaatgctattttgttcaaggatagttttatttttaataaattgtgggagccaggtgttggtggcacacacctttaatccaagcactcaggaggcagaggcaggtagatctctgtgagttcgaggccagcctcatctacagaggagtttcaggacagcctccaaagcaatacagagaaaccctgtctcaaaaaaccaaaaataattaattaattgtgggtatgtgtccacaagcgcaggtatcgcaccagccctgggttccctacaacagcagtacaagggctcttagtgtataagtcagctctccaaacaagtggacagttaggaagattttgacactttagaacaaaccccattcatgttctcttcagcttcttcagtctcattattcctctggtttgctgtgcctaccttatacaggatactaatcaacagcaggaagtagggagcaacaagtggctacatatactttatttccagttcaaagactgatgagattgcaaaatgacctatcttctttttgtgtttgttttgttttgttttgttttgtttttcgagacagggtttctctgtggctttggaggctgtcctggaactagctcttgtagaccagggtggtctcgaactcacagagatccgcctgcttctgcctccctagtgctgggattaaaggcgtgcgccaccaatgcccggcggacctatcttctttttagattctttgttttatgtgtatgagtgttttgcctgagtgcatgttaaagggggcattggatcccttggaactggagttaagaatgactgtaagccaccatgtggatgctgagaactaaacctgggtccatttcaagagctacaaccgttcttaacagctgagccatctctccaggtccctgatagatcttttaaatctataagggattctaagggccaagacaagtctcagaggctagaaatgcttacagcaaagtctcacttcccgagttctatccccaggaaccccacagtagaaagcgagaagcaatgcctgcaagttgttttctggcctccacatcaacgcacacccattcaaaataaataaaggtaactaaaacttcaatgttttaaatatatatgctgttcctgcctatcaactaccatgagtaattatataaaagctgaaaactgtttttaaaactatcatgtgagccaggcaatcatggcacatgcctttaatcccaacactgaggatgcaaaggcagtcggatctgagttcaaagattgcctggtctacagagctacatctgggacagtaatgcatatggagaaaaccagtctccaaaacaagaaagaaaataaaattcatttccaaataaataaaacctatgtttaaataatcaaagcagagtaaaacagctatgcattaaattaggcaatctcaataaaggtcctgaagttataaaaatgaaccaaatgaaaattatgttgaaaagcattacactaaaattaaaaattcatgccaggtgtggtggtgcatgactttaatcatataactcaggaggcagaagcaggcaaatctctgtgactttgagatcagcctggtctacaaaaagagctccaggatagccagagaaatgctgtctcaaaaaaaaaaaaaaaaaaaaaaaaaaaagaaaaggggggggggctcccacttttaatcccaggactcaggaggcagaggcaggcgatctctgtgagttcaaggccagcctggtctacaagagatagtaccaggacaacctccaagccacagagaaaccctgtctcaaaaaaaaaagggggggggtagaaagaaggaaagaaaattccttcaggctgaacaactcaaatccatgaacagaaatgcatacaaagaaatagatataaacctatataaagaaataaacatgcagtaaatataaaatgctcttttacaagacatacaactgaaagagcaaacagcagaagtcctgaggagaatgacagagctggtgatacctgactaggggttcagctgtacaggaggctgacttgagggtcacacatgcaacagttcctgactaacacaggccctgcacctcaagacaacaaagggaaaataaacacagaagactgtactattgtacattaactactgagaacagacaggatgggagggttgcatctagactgaagccaagtttctatgtcaaaataaagttgttcttaatctgaagtagttataataaattaaaaactatattgccgcatatggtggcacacacttgaagtgccggcactcagcacattgagacagtaaggttgtgctgaattataagcaaacctaggctacacagtgagcaacaggtcagtctggagaatctcttttttaaaaaaacaaaaacaaataacataggaaaagagactgttaggtataaaaaaggttgtcctctgatcacctacgtgctctgtagcattcgtgccctatgcatacacaaatgtaagtatcactcgattgctgattggtatgaggactcgcccactaagggtggaaggatttcttgcacaggcagttctagacagcataaaaaagctatctagagtcagttcttggccggcagtgatggcatacaccttcaatcgaagcactcaggaggcagaggcatgagttcaatgacaagctggtctacagaaagaattctaagacagccagggctacacagagaaacttgtgggggacgacccccaagtttcagttcagttcccagcacctaagtcaagtggcttacaaccactataacacagacacacacaaagaattaaaagtaaaaataataatactaaaaaaatgacacaagtagaagtcaagtagagaacaagcctgtaagcagcattctcctatgcttctgcttcaagctgctgtcttgcctttcctccatgaactgtgacagagtaagaccaatcctcaaattaattcccaaagagaaaaacccagggaagacagtaaaatttcactggtaaattctatcaaatgtattcaaacagtaacaccagtccttcacaaaccctcacagtaaatgagaggaagaaatactcaacacacccctcaaggttagtgtaactctagaaccaaaccagaggaaacatcacttctcttggctaaaattaagcataaatcaaaatatatataaaatgaaaaaaatttaaaaataagtcaaaatcactaaatcagaatccatcaatgtataattgtttgcattgactaagggagacttatcctggaaacccgcttcatacttgaaatgtcaaatgacataatatagcatgctactggaataaaggacaaaccatactatcttatagtgaccaatcatactgatttgtgtaggactgaagggctttccaagatgcaaaatttttgtgctaaacaagggcagacccaggtaaactgtcacagctggtaatgccaatatcagtctgtgactggtctaatacccatgcatgtttaaaaaacacaacagaggagcgcctgctacaaaacagccacggccagcctcctatgaacctggcaaatgccaccaacctagaggatgccatcaatctggcagatgccatgcaggctctcgcccacttctaatcagccttggacttcctggtggttctactcaaaggaaggaaagaaaagagggaaaacgagaaatgtattctgattagacaatgcaaagctaccttcactcacaggctatatggtattgtacgtaaaaaatactgcagagttcgcccaaaatactggaagaataattacttcagagagatgaaagtatacaagatcaatatgcaaaaaaaaaaaaaaatcagtgcagcttctatacaccagcaataaaactggcacaacattttaaaagacaactacatccatgcacccaggagatgacttaggggtaaaggcacttgctgccaaacctgatgccctaagttccatccctaggtcccacatggggaaaggagagaacttagtcccaaaagttgtcacacagtacatcatggcatgtgcacacacactaaacaaatgtgaagaaaaagaactaagacaattccattcacagtatcacctaaaagaataaaatactcagaaaatacactgaaaaagaagtataaatattatacatacatataatggaatattagtgagcctttaaaaataagaaaattctgctatttgcaacatggataaaccttgagaacattatgctaaatgaaataaggcagacacagaaaggcaaatatggtcacatgagttatctaaaatagccaaattcaagcagagaacaggggtcaccaggaactggcagcttaagagggagatgcctagctatccatcaatgtacataaagtttgagttttacaaaatgaattctagagatctgctataccacattttgatcatagtaaacaatactgtattatacacttaaatacagctacttttttttttcattacaaggtagccactcagcttgtaggttctcttttaaagtatgaggtttattcactgaaaaatataaattctaaatactacttaagatcagtaaatgaaattctcatgttcaatgtggtaagaagggaattcttggccaggcattgctggcacatgcctttaatcccagcactcgggaggcagaggcaggcagatctctgtaagttcaaggtcagcctggtctacagagttctaggacagcccagtctataaataaaaaccccatctcaaataaacaaaaataaattttaaaagggggggtgggggctggaaggatggtttgtttattagcatgtttaaccaagaccatgagaaaaaagacaggagaggacaattatgattgccgactatgaaacaataacatcactctgaatcgaaaggaaaactcaaaacttcaatgagctagccactccatatccattaacatgaccacatcatacctactataactgaaaaggacagacagtcataagtattgacacagagctggaaagatggctcagcagttaagagcaccgaatgctcttccagagagcccaggttcaattcccagcaaccacatgtcagttcacaactgtctgcaactccagttcctgaggacccaacacccttggcaaacaccaatgcacataaaataaaaataaataaatttaagccggacgttggtggcacatgcctttaatcccagcacttgggaggcagaggcaggcagatctctgtgagttcaaggccagcctggtctacagagtgagtatcaggataggctccaaagctatactagagaaaccctgtcttgagaaaaaaaatgaataaataaatttaaaaaagtaagtgttgacagtatgactgtttgagcatgcaacttgttactgccactttgagaaacagtttggaagtttctcagaaagctaaacaagacacagtagttccattcccatttgtttactcataaaaaggaagccatacatccatataaagacttgtaatcaaacattcatggtgtatcattttaaacggtctgaaactgcaaacaatccaaatacctatcaaccagtcaactgacaaatgtagtatatccacaaaatatatattacttctcagcaataaaaaggaataaagtcccgatacatgctacaatatagaaaattctcagaagtgtgctaagtgaaagatgtcaaatctaatatatatatatatatatgattccattatgcaaaatggccagaggaagcaaacataggaacaaattggtgacagcctaggtagggctggggctttggggtttgaggccaacaacaaataagctgaagaaaattttgggggtgggcataaaatcatattctaaagaaagtctgggatgttctcaatcccatacatttattaagaaatactggattatacactcaaaatggatgaattatttttgctattgagccaaaaggctgatttctttaaaaaataccactccaaagagaaatgaaagaatattactcataatagccaagaaatggaagctcaagaacctaacagctgatgaatgggtaaatatcaggaagcctatgaatgcaaaggagttattactcagcaaaatagtaacaataaagtactgccacatgctacaacatgcatattttaaaaactttatgctatgtgaaaaggaccaatcacaaaaggttacattgtgtactcgtgtacttacataaaatactgacagatgacagagatacaaagtacatgagtggttccctagagccagaaggatgggggcagaaaggagtaggactgctcgtgggtatgagagttggtcggttagtttctttgactggtggcactggggatcgaactcaagacctcccccatgcaaagcaaacactgtaccactgagctgtaccacatgccgacccatgtgactgttttagaggtaaagaacatgctttttaaatttgagtacagtaattgtgcaactctgaatataccctaaaacctccattgaacttgtacattaataatcaactaaatggcatgtggttagtatttcaataatgcttctacctctccccaccccgacccattcacaaaaaaaaaaaaaaaaaaaaaaaaatacataacctgtgaactggtaaaactatcaactttaatttggtaggcccactacaaccactgaagagacttgggattgaaaaacctccaaattcttcccaagcatactctgggtatgttgtaattatttatgccttcaaagtacaatgattaattcaagcaatcaattttttaaaaaagggtaacattgcaagcctttaaacccagcgcttgggaggcagaggcaggcagatctctgtgagtttgaggccaacctgatctacaatgcaagttccaggacaaccaaagctacagagaggccctatcctgcctcgaaaacaaaacccccaaacaaaatattaaatactgaaattttaaatgttgaagacgctttaaatttctacttcttgtatttactaaatgtatcaactgcggccacatgaatgaactctatacattgtcttctataaaccttattcccagtctcacatgaagtcattcaaccctatgaagacaaactgtaacccacaagtatacaatcttatctcagtaaggcccggacggacattgttccgattctggcacttagggaaagtaagtaattcgactcttaaccaggcctcggagaaaaaagaaaagcaaaaatctgaagatcaaaggagcgctttctattatagtttctcactgccggattaaaacagaaaccacagagtaatgtcatcaacacgagacagatgccccagggttccagggacgcggccccatcttactctcacttgataagagtactaagaacttaaataaaggctattctgttgaggacgtggctcctctgaggacagcccagcaagttggcccatgaggggcatcggaaactgcactggggctgactcccggcaccgtgggttatttttctgtcctttgctgacagagtgaaaatgtcccactgaagccctgagtgggtccgnnnnnnnnnnnnnnnnnnnnnnnnnnnnnnnnnnnnnnnnnnnnnnnnnnnnnnnnnnnnnnnnnnnnnnnnnnnnnnnnnnnnnnnnnnnnnnnnnnnnnnnnnnnnnnnnnnnnnnnnnnnnnnnnnnnnnnnnnnnnnnnnnnnnnnnnnnnnnnnnnnnnnnnnnnnnnnnnnnnnnnnnnnnnnnnnnnnnnnnnnnnnnnnnnnnnnnnnnnnnnnnnnnnnnnnnnnnnnnnnnnnnnnnnnnnnnnnnnnnnnnnnnnnnnnnnnnnnnnnnnnnnnnnnnnnnnnnnnnnnnnnnnnnnnnnnnnnnnnnnnnnnnnnnnnnnnnnnnnnnnnnnnnnnnnnnnnnnnnnnnnnnnnnnnnnnnnnnnnnnnnnnnnnnnnnnnnnnnnnnnnnnnnnnnnnnnnnnnnnnnnnnnnnnnnnnnnnnnnnnnnnnnnnnnnnnnnnnnnnnnnnnnnnnnnnnnnnnnnnnnnnnnnnnnnnnnnnnnnnnnnnnnnnnnnnnnnnnnnnnnnnnnnnnnnnnnnnnnnnnnnnnnnnnnnnnnnnnnnnnnnnnnnnnnnnnnnnnnnnnnnnnnnnnnnnnnnnnnnnnnnnnnnnnnnnnnnnnnnnnnnnnnnnnnnnnnnnnnnnnnnnnnnnnnnnnnnnnnnnnnnnnnnnnnnnnnnnnnnnnnnnnnnnnnnnnnnnnnnnnnnnnnnnnnnnnnnnnnnnnnnnnnnnnnnnnnnnnnnnnnnnnnnnnnnnnnnnnnnnnnnnnnnnnnnnnnnnnnnnnnnnnnnnnnnnnnnnnnnnnnnnnnnnnnnnnnnnnnnnnnnnnnnnnnnnnnnnnnnnnnnnnnnnnnnnnnnnnnnnnnnnnnnnnnnnnnnnnnnnnnnnnnnnnnnnnnnnnnnnnnnnnnnnnnnnnnnnnnnnnnnnnnnnnnnnnnnnnnnnnnnnnnnnnnnnnnnnnnnnnnnnnnnnnnnnnnnnnnnnnnnnnnnnnnnnnnnnnnnnnnnnnnnnnnnnnnnnnnnnnnnnnnnnnnnnnnnnnnnnnnnnnnnnnnnnnnnnnnnnnnnnnnnnnnnnnnnnnnnnnnnnnnnnnnnnnnnnnnnnnnnnnnnnnnnnnnnnnnnnnnnnnnnnnnnnnnnnnnnnnnnnnnnnnnnnnnnnnnnnnnnnnnnnnnnnnnnnnnnnnnnnnnnnnnnnnnnnnnnnnnnnnnnnnnnnnnnnnnnnnnnnnnnnnnnnnnnnnnnnnnnnnnnnnnnnnnnnnnnnnnnnnnnnnnnnnnnnnnnnnnnnnnnnnnnnnnnnnnnnnnnnnnnnnnnnnnnnnnnnnnnnnnnnnnnnnnnnnnnnnnnnnnnnnnnnnnnnnnnnnnnnnnnnnnnnnnnnnnnnnnnnnnnnnnnnnnnnnnnnnnnnnnnnnnnnnnnnnnnnnnnnnnnnnnnnnnnnnnnnnnnnnnnnnnnnnnnnnnnnnnnnnnnnnnnnnnnnnnnnnnnnnnnnnnnnnnnnnnnnnnnnnnnnnnnnnnnnnnnnnnnnnnnnnnnnnnnnnnnnnnnnnnnnnnnnnnnnnnnnnnnnnnnnnnnnnnnnnnnnnnnnnnnnnnnnnnnnnnnnnnnnnnnnnnnnnnnnnnnnnnnnnnnnnnnnnnnnnnnnnnnnnnngccgcgaagtaactcaagtcccgggatcttcggggccagggtgaaggagcgcgtgtgagtggagaagggagactatgttgttccaagtgtccgcgaattggggaggaaaaaaaaaggaagccagcagaagctgcaggcttctggtttgcacactttcacacaaaggggagcctctgagcagggcactctcacgcgccttccagggcacaaaagccaatgacacggtgcccgggatgtcctgcgttttgcagcggctcgctaatggtctttcttaggctcagttatgcatgcaaacgcccgggtctctcccccccaccaccaccattccccgccgccacggctggtattcgtttctttaacaaagagcatcggcggctgtcccggtgcgcgcgggggctgatcctgctgtgctcagactcttgcagcctccctgcgggagactcagctcttggaacagcatccaccaggttaatttctgggctccaaccggactgtttttgatgctctacaaccggtttttacggaaacgaaatactgagctgtttgatagctgtttaaatgaacgtgggaaacgtggaaatgaccctggaatagggctcaaatgttggagacaaacggaggctgctgtgttttaaatcccttgatgaacgtaagaatttaacctcatttaaaaagctgttaatgcctagttggaggtaattctttcgaatcataaaaagcaactttttaacaagacattctctctctgagctgtagtagaaacctgaattcgcagagtggttaatcagtgatcctcttaactcgtgggaagttttcagtcttgagttcaaaggcttggtgaccattgacacccctctgaactacatgtatggagtctcagtaactttcagaccttaaatatataagagggtactgcacacacagcatgcttttctggaggacagtgtttctcctatttcttataaaatcagttatcacatatgagaaccactgcccactttggcactttctgagtaagaatactgtatctctcacatggcaggagcttgctttctttagttaaagataaatcttacatgcaggaacatcctattcctgttagctactttcaaaagaaatgtttctcccatttcccatctagagtaagctggaaagtcccaggcaaaaaacttcctgctcttgatttttttttttttcactgttaaatgcgcgcatatacttttgaaatgtagatctgagagctgaagagatggctcagccaacctcatgatcttcccgaaaacctgagccccaacacccacattatgactcacaaccatctgtaactccagttccagggtatccaatgccatttttttttctagcttctgtggataccaggcatgcacatggtgcaaagatacacatgtaggcaaaacactcacacacataaaataataaaacaatgctctttaaaaaagaaatgtagatctgttgtaactcagatttaaaacattcctccaccctgttgatgttgaattcagataattttatttgcttctggccaaagtaacatgggcagaagttacagtataaggattctgaaggtcctggcctcaagagttattgcatgtttctcctcgcctccctagcacttctggcttacacaatttgaagaacatgtctggggagtctgctggtccaagaaagattgattacacacacacacacacacacacacacatacagggaatggcccggaacaattctgagcttatagccaagaacctgtatgttgtgcaacagttgaaaaactccatcctgaagggaagctccttaagcaggaagattaacaactcaaaagagcttcaggaagtccctgaaactgaccagattcactaggcccctccctgaaagagtaagcaataaaaggtaagagttcctctcagaagagcaaagccaagctgcagagaagactcttaacaccagagcagctgcctggaagaagcagaaagcagctgagctgtctggaagagatttagcccaaccgaggcacctggaaaggacacgctccaacctgttgagctgcctacaggctgtgcagtgtgctccaagttcccagctttgtgagctgttacctctgctggggtgggctttgctgatacagctgcctttgagtcatttctgttcttgtaaagaacccctcacctatccttctctaagtaacccaataaaactcattggttcaccagattggactttggtgatagctatactttggtctgtgtaggttctctaactcaggtggtttgtcacacaacattgaggaatataaggttttttttgtttgcttctttgacatggtccttccaggtgtgtttcttagcataggccccaacataaaattcctaagattatagatatgcccatcaacacacctatgtagtacaccctgctttttgagtatgttgagtatgccagatgaaatggtctgctgtctttgtactagccaacatggtaaagaatgaggatctctgagagagctcttaggaagcaggcattcgaaagacacaccttttgtagaaagaagcctagtaagaaatgagaaaaatttaccacaaagggttttttaagaccccagggtcagggggaaaggttgtctgatgaagccaggaatcccagcagcaagctaaggatcatgcaacagatagctatgttataattgcattgattttatttttttatatcacataattcatttcttgattctacatgtgtgccattaatatattgtcatcattgtttttcaaatactatacaataaacatattacgaattcaagtctaagacaggaggtgatggcacatgtctttaatctcagcccttaggaggcagaagcagacagatctctgtgagttcaaggccagcctgctctatagagcaagttccaggacagccaggactacaaagagaaacccagtctcaagaaaccaaaaaagaataaaaaggaatccaagtctagggagatagttcagttgttaaagtgcttgctatgtacgcctcggggacagggtttgagccccagaacccacgttggtttttttttttttttttttttttttttttatgatcattggtattctgcctacatgtatgtcagaagccctggatctggatgtacagacaggtgtgagctgtcatgtgggtactggaaattgaacttgggtcctctggaagagcagccagggctcttaactgataaaccatcgcaccagcccccagaatctaagttttaaataaaaagtcagtcatgagctaggcatggtggcacctgcatttaatctcagcccttgggaggctgaggcagcaagagctctgtaaattcaaggccaccctgtctacatattattgaactgtaggccagccaaggtgaaaccctgcctcaaacaaacaagcctggttgttgttggtggcacaagcctttaatcccagcactttggaggcagacgtaggcagatctccatgagtttgaggccagccagcctggtaagttccagcacaactagggctgtcacacaaagaaaccctgagtctcaaaaaaccaaaacaaacaaaagtcaggtaatggggacttgtaactccagcacaggtcaagatctggtctaggcctcctgaggaaaaacacctgagggtgacccctctagctggctccacgtgcacacacaccagagggggagaaaaagttgaatccaactccctctatacttagcctttcatacttttccagtcattccacacctctcctctttctcagatgcccataaaaatagtttagcatgtgccggagtcctctgaaagagcaaaaagtgctcttaggcgctgagccatctctccaggcccagtttcagatgttttacgtgcacatatatacatatgcatatgcgaaggcaaattaaacatacacgggattatataacatgtgctggtgaaatatttttatatcttttctctgtgtttatttcccctctgttctctttaattacacagaaagtctttttaaattttagcctgtcttctgtaggacaagctgagcaaaagaagaggttttcctgctttaatatcagtatgttaaacgggagaaggactagttagggcccattgtgggagtagcagtgacaattgtcaggaaaacacaagaggaaactaaatcctcagacttggccaatagactagttccctctactaaccaggatatttgcttttgggtgatcagagttatttttaattaaacaaagctatgttattttataaccttcaaagtcagtccaagaacaaggtataggctattctgaccttgcctgggcactcacacacggtcacttctaacacattcagttagtggcctacctcagtgtgggagaccactactcaaatatcttaataccaaaagctgagagtggtcagggaccatgcacacaacagtgagtgtgacttaagcagtgtttaaactcatgtctctttcatctcaggctgggatagtcctggatgtcagtgaccacacacactttataaaatcaatcagaaaaaactcttatttggcccccccttaaataaatggttctgagtgaccagccagttgaattctggtgttgacctaccctgcctactgtggacaggtatcgatacccttcccactctcctttctgagcttctgcagagaagataggattccttttgctcattgcaaaggaattcagtctctgagttcattttttgatttaggtattatctggccttttttttcttttttttttttatgtgtaagagtgtattgactatagggtgaggggaagtgggaggaagtggcacctccctttaatcctagcactcagggaagcagagtcaggaggatctctgtaaattcaaggccagactggtctacagaatgagttccaggacagcaaaagcttctcaaagaaacctgtcttgaaaaaaaaaaaaaaaaaagtgttttgcctgcttgtatgcctgtgtaccacttgcacacctattgtccaaggagaccattagaatgaatgcatcagatcccctgagtctgagattacagacagttgtgagttaccctgggggttctgggaattgaacccatgtcctctggaagagcagccagtactcttaactgctagagtcatctctccagccccttttcttttataaagcagaatcttttaaaacctatgtagtgatcaaattacaaacacagctaggcagtggtggcacaagctctgctctcaggaggcagaagcaggtgaatctttgagtttgagtttacagaactgagttccaggacaaacagggcatacaaagaaaccctgtctcaaacaaaacaaaacaaaaacaaaaaaaagatctgtctcagatattcacaaaaccaaattgcttttgagaggacatgttaaatttctagactacaaggagaaacaatattttttacatttatttattgtgtgttcctgttgtgtgcaaacagatgccaggacacacttgaggaggtcagaggacaacttaagagactcagttctctccttccaccatctgggattgaactcaaatcatcagacttgacagcaaatgccattacttgctgaaccatctcactgaccttaatgaagcattttttttttagtttgttcatacccttctcccacctggaatttcctatgcatacctggctgccctccttcaattcatagagacctcctgcctctgcctctctaagtgctaggattaaaggcatgtgccaccatagctagctcccaatgaagtaatctttcaggatgaaatgtgtagcatcaaatgccatcagataaaatacgtaggaagtataaagtattcgacatacaaaagaagttaggtcctcaggattatgtccacataatgtcttctactaaaacaggctgtcatttcatatttgttcttggtgttcttcatatataaatacacacacacacacacacacacacacacacacacatatatatacacacatatatatagtacaacctatagtatataacatacaatatatatcatatcatatatcatttgtttataatataatgtatacctatattatataatatgtacattatatgatgtatatgtatcgtataattatatacattacatgataatatatatacacacacagggtttttctgtgtcaccaaccaccctggcagtcctgaaacttgctcagtagggcagtctggtctcaaactcctccagaatgctgggtttaaagatgtgcgccaccatggcccggctcccttttggtttttgagacataattttactctacatcctaggctgtcttaaactcacaatgaagcccagggttgctgacctcatattcttggcaatcctcctatctcggcctccctctggagtcctgggattaaaggcttattttatctgttcatgtcaaccaccaaggacaacagatacggtcctctgctccagccttcacactagcatcacattccattcttccaaattcatgtatggtgctacccaactcacttctgccttgcctgcctgctctgcctgataatccaagctctgttgcaaaggccaggctccctagctccagacatcggtatttgccaacagagtcctctgcctccgcctctggcttctgtatcctgctcttccttcgccccttcctgtctgagcacattcttttctgtaactgctagttaactgttactagggagagacggggagtaggaggagtggcagagagagtcaagataagccagccaacatggtggttaactgtgctccctggaggtccaggattaaacatgaattcccaacaagaaacagttggaagaaatgagaagaaggcttgagagttgtaaaatataatgaaggccagtgaggtagctccatggataaaggcacttgccactgagcctgaagacctgagacccacatgttggaagaagagaaccaaattattctccttcatatatgcactgtgtcataaactcccctacccatacacaaaataaatagatgaggggcagtggggacccacaactttaatcccagcactgaggaggcagaggtaggcagatctctgtgagtctgagaccagcctggtctacagaagaagttccaggacagccaaggctacacagataaaccccatctcaaaaagaaaaaaaaatgaatagacagatagatagaagcatgtatgtgtgtgcctggtgcccacagaagtcagaagagagtgtcaggttctctgggaatggagctcaggtggttgtgagccatcatataactgctgggaatcgaactcaggtcttttatcaaagcaacaaaaggtgttagctgcagagccatctctcaagccccactgtgtaatgattcttttttttttttaaagattttatttatttattatgtatacaacattctgctttcatatatatgtacacaccagaagaaagcaccagatctcataatggatgtttgtgagccaccatgtggttgctgggaattgaactcaggacctctggaagagcagtcggtactcttaacctctgagccatctctccagcccatgattctgcagcagtatttcctagacagactagaaggatagctaattaaaatttgggttttgttattgttggtctagaaaagcttgtatcggcctcacaatttgtaatctataatatcttatgaactcttaggtttatcgttgatttaagaaaacatctgtcacatttcttttatctagaagtatttggggagctggtgaaatgtctctcgaagatcactggctgctcttcaagaggatcggggtcctattcccagaagccacatggaagttcacaccagtatctataactccagcctgaaggattctgatgccctaatctgaactgtagggtgcctttacggtacctgtatgcatacaacatacccccacagagacacaaatacacacacatacacatacacacacacacacacacacacacacacacaattttttgctgttgttgtttttgtttttcaagacagggtttctctgtgtagtcctggctgtcctggaacttgctctgtagaccaagttggcctggaactcagagatccacctgcctctgcctccaaagtgctgggattaaaggcatgtgccacccaaagtccaacttggtgagccaatgagttgtattaggaatatgggtgagggattacttacaaaagcaaaaatgactcaaagacagatgcatcaataaagcttaccccagcatgggtgacagctcacagcctgtaggcagctccacaggttggagggtgtcctttccaggtgcctcatttggtgtaacatattccaagtcattcatctccttcctgcttcttctaagcagctgctctggtgtccgggtcttctctacagtttagctttgctcttctgagagggactctcagagcttattgcttacttgggccaggaggggcctagtgaatctgataagtttcagggacttcctgaagctcttttgagttatcttcctgcttaaggagcttccctgcaggatgaaatgttgcaatctagataacactgttacacaactctggtgcaaattactgcaatagtctaaaacctcaaacatcgaggaagcagattttctcacttcaaattccctcccacgattaaaaacaaaaataattctgtgtgtgatgttaactcttcctgggaatgagtcaacaaatatctgtttataccagttagggaaccaaggacagctcaaggtaatgattccaccaaagtccaacttggtaaccaattactttgttggccttgcttaacaaacatgagtaagggtttacttagagcctcatgggtgaccccagaacaatgtcaccaacaaagtctcacaccatcataatatcgacctctgggaacttgcatcattaaggaccaaagttaaccttcctcttcctttagaaatgctaatgtttccctggatcccttgcagctggcaggaggtaggaaaagtgtagtcaggaggtggtagggctgtaacgtttggaattccagattccaaccctgttaacattcacttcccttcctaactaaagaatgtcaatagctccatagcattgtcagaggcctacctatctccacttatttcattgcttgaattatgaggaaatcttataccccagtatggcaatgggatgcccatgttatacccacaaggaaaagctatattgcagtatactgtcttgcacagacttcaggaatgtgcaactagagagatggaagtcggacacaggctatggttaaaaaaatctcacttcacagtttatggaaatgctttgaccactcgcatagacagatttcaagggcccacccacattccttccctaaagtcatcagtttgagaggccctgatgttcaggttcaaactgatctgaggctcatctgtctcccaagggttctccagatcactttccggtaatatactgtcatttcctacttagtttagatattcacaacccaaagtgtctcattcaaaccagtattagatagtgtttgcagattgttgaattagaacctgcagcatgggaacagagactggaaagcctactacacctggtgcatcttacaaccctggggaagggggttgctgtgcaatgatttgtaacgcatgggtctcatgcccaactactatttaagcttttctttttttattaaagatttatttattgccgggcgttggtggcacacacctttaatcccagcactcgggagacagaggcaggcagatctctgggagtttgcagccagcctggtctccagagcaagtgcaggataggctccaaagctacacagagaaaccttgtctcgaaaaaccaaaaaagaattatttattttatgtgaattgtttgtctgcatgtatatctatctgtgtgagggcgtcagatcccctgaaaccgagtgagagatagttgttctaggtgctaggaattgaacccaggtcctctgaaagagcagccagtgctcttaaccacttaatctctgtagcatctaaggttttcttttagctcactagccaactcccattctcagtgttctgtttctcaataaactgtgagggttttttccttttttttttttttttttttgagacagggtatctctgtacctttggagcccatcctggaactcactctgtcgaccaggctgacctcaaactcatagagacatgcctgcctctgcctcctgagtcatgggattttgtttctaaccaagtgtccctagtctaactcttgctgtggtacctatacacagatggaccactgtacatgatattattttcagcatgaatgcaaaaccacaactcttaccccaaaggggataaaaggtggtataatttggagccaaatatgaatgaccacagccctggaatttaagttactccaaattctatatttcaacatggaagctgtttaggggagtttttatggtaacaaaacaaagttagacatcaagacacttaaaaacaaacagaaacaaaatgaaaaaaaacttttaatttgttttctaaattaaagtcactcattttattttatggtgttttcctgtgtgtatgtatgtgcaccacattcatccttggtgcccacagagatcagaagatgtctttaactggaggtagaagtggttgtgaaccactatcagtgctgggtatcaaatctagctcctttctctccaagagcaacaagcacttttaactgacataccacctctccagcctgactttgtatttcctatttatgtggatatgtgcctgtgtgaggttatgagtaccactggggtgcaggagcccacagaggtcagaatagagcactgaatcccctggaaccacagtagagacctttgtttactgccatatgggtgctagaaccaaaacctggtcctctgcaagagcagtaagttctctaaactgctgagccatctctctggcccaaaacaccttttaaataccttggtggaaattaagtaggcacacagcagagaaatctcagctctaaccctcagatgttacctgacaacattcttaggttttattttgataaaagctagtgtctgctaaaaaaacatattgcaaaaggtttttttatttattaatcacaggatgttaggaccaacacttaggtgggtaaggaagggctatttagggagcctaaatatagcacaagataaatagtagttagtttctggacttgcaatattccaacctctcattattactgcagttctcattgaacaaaacaaccccccaccctccaccccccacccccgccattttggcagccatgacaggctaacgtgcttgcctgaccttgctgggcctgccctggtcactaggaggtcagatgccctcctcatggcaatgaaccaatcagaagttagctggccgggctatgctttatgactctgggtgtgctttatgtacaagtgcactacagtgccgtgcagagcataacaaccaccctaggagggcctatggggcataaaagcagttgaccaatcaacacagggcaggttgtcctggaagcacaccaatcctgagactgttgcatacccctagacactgccctataagatccctgtctcgtggtttcttggagtcattctccaaccatctgccacagtggatggatgaaaggtccaagctaatgaggttagctcgttaaacaactgcaataaaagactctttgcttttgcattgaaatgggcctcttggtgattttggggttcagaatttgggcacaacatcagacacagctgctttccaagaaacatcagagcaggatgccttggtttgagctgatcctgccattgaagatgtctacacacagtttaagtcagccctagcctaccaggcagacctcccaagacttttcttcctcccttccttgctcttttttgagggtctcactatgtatcactggatagccttgaacttggagtctttctgcctttgcctcccgagaactgagattaaaagaggatgcttctgtgctggagagacagctcaatggttaagagcactggctgttcttgaagaggatcaggttcagatcccagtatcacatggctgcttacaattgtacaattgtacaattgtcagctctggagactccaacacccactctggtctctttgggtatactgcattcatgtgatgcaggctcacacgcatgaaattttttgttgtttttggttttgatggtttttttccgagacagggtttctctgtgtaacagctctcactatctcggaagtaactctgtagaccaggctggcctcgaactcacaaagatctacctgcctctgtctcccaagtgctaggattaaaagggatgcgccaccaatgccctccggctgaaaaatggatgctgccacttgtctcactttttcattctcattctctctctctctctctctctctctctctctctctctcccttccccctcccctccttccttttccttttctttttgtcttgttttccgagaacagttccagctgtcctagaactcactctgttggccaggccttgaactcacagagatccacctgcatctgtctcctaagtgctggaattaaaagcgtgcagcaccactgcccggcccttcctttcttttctttttttaaattaatttatttttgccatttgaatcccagttccccctccctcctctcctctgtctacccccacttccccctcaccccacctcccatctgctaccttaggaagtctactaagtctgtcccaacatgtcagtgaggcaggtccaaggcaccttgccaacccccacacccctctatgtcctttctttctttttttttttttttttttgttttttttttttttttttttnnnnnnnnnnagaatttctctgtgtagcttaggagcctatcctggcactcgctctggagaccaggctggcctcgaactcccagagatccacttgcctgcctcccgagtgctgggattaaaggagtgagccaccaacgcccgactatgtcctttcttttcttatcttttctttctttaatagtttattgagtaactcttttattattatcattattaattatatgtattgacttttcatctgcaggtatgcaccactagtgagactggtgcccaagaacaccaggagaaggtatcagagcccctggaactgggtgctgggaattgaagccagcggagccacctctccatccctcaagagttttctcaagggagtctaggcgcctcattggtcacaccttggaccttcccatctgggtgccctttcagaaggtgttcctaggcaaaattccctcccttgccctgtctgtcagaggtacttgtcttttagagtcaactatctcaaatatcacacccagaaagcctttctggtttctaaacacatccctcaacttcccttggactcaccacagcttctggtttttgcttacccaccagcactgtattttaccttagtttataattgttgtaatcagtagccttaaatctcagtctctaaaggcagcaagcaagggcaagggtggatgggatatgttcaaagtgattactggaaatttcttaagaaggtactaatttaaggaacaacttactggcctgcactctcctgtgggattgaagacagcactgccacagcctacatgaaagggtctgactccagggcctggagagtccatttagcctttaaaatctccactgttcttgcctcggatctgtgctggttcccagcacccacgtggtggctcccacatgcctgtaactctagttcgagaggatttaacatactctctgatctctttaggcatcaggtacatacatggtgcacagacaaaacactcatacacataaattatatatattaattaaagatttaagatctgactgcacagagggccctagtatactaactgcaaaatcttcaaggcagagtcacagggcccaacacaccttaaccccagacatgtgataagattgctgatccatttaaattcttctctccttctcttagagaatgcaattgaacccatgtactctaaaagcatttacaatgggattttacagtacctaaagtagatttaggagtgactaagacacagactctgacaataaactaagttgttcgattcctagcaccagcacttactaagatgtatatagccttgctgaggtacttaatcgcctgttttcttacacctccacttatgtctacaaaatggaatagtaataaggccaagttaataagcttgtttgaaggataaagtcagttaatccataaaagcatagtacttaccctctaagtctctgtggctctcttctgttggtagtgaggtccttttgttctgtagtcctggctgtagcctggaactcagcctgtagctcactcaagctgacctcagattttcagtaagcctcctgaatgctgagattcataggcctacaccatgcgttgccagaccctttatattttgaatgaaagttacaggagttaatatatacatatattatacactcggtgcctgtgttgacactcagtagatatgagctggtattacttgtcctgtcagtgtctcagtgttctcatctgcaggaggagaagatagtaatgagacctctctcatttacttgtgaacaactaaataagaagtactacataggcctgctggctttcactcacagcactcctcctgtctagcctcctgaatgttaggattaccataatagctttcaagttcccaatattcctgatttagggaatgtcattgtgtggtatgtgtgtgagtcagacagagacacacagagagacagaaagaggtatgcacaggtgccctctccatgcagggctcatggtggccagaggctggcttccagtgtctttcacaataaggtttctatagcttattttcggagccatggtctgtccctgaccctgaaacttgctgatttggctaggctggctggccatggaacccggaggattatctgctgtctccaccccccacctccagcagtaggattgcaggtatgttctgctgtgcctggctcttatgaagatgctaggggctgacggaagatccttatgtttatgtttgtgcagccagtactttacccatggagccatctccctagccctcaacaccctttttaaaggtcaaaaaaacagaacaaacaaagaaaccaaccaagtttgcttgctttctaattagagcatatcacctgttttgttatgtaattgctggcatcttttatctctcctttctcaatgggagtcctaagagtctaattcaggcttggtgccaagtgcttttccttcacggagccatctcacctcaagttttgggagacactattgttagttcagggaagcctgaggaatgcagtccatagtcaggcaagcacagtgaactgtatcctgctcttgacttccttcctgtgaatgggaggcaggggtacaggtgagtagtgggttgcccttgctttcctggtttccctgatgggcatggctgcctcttgtccatcatgccagcttccagacaccccacactaccatatatgctactgtgttccaagttagctatgaaatagaggatgaccttgatgtcctcttaggtcctccttgctctacttcccaagtgccaccatgcccatcacaaagcacatatatatattattttaaaagcttgagcaggagaaggagagagactaaggtagatataggtccttgctgtactttgtttggatacctgttcatcattttgaaaaaatgagctgggcagtggtggcgcatgtctttaatcccagcatttgtgaggcaaaggaaggtggatctctgagtttgaggccagcctcaaggaagaaaggaaggaaggaaggaaggaaggaaggaaggaaggaaggaaggaaggaagagaaaaaggaaaccgtgtaaattctgcacttccctttgtgctctctaacataaccatgcctggaaagtcagccacttttctgacatgtccgaccatctgtactgtacactaggtaggtcatatgagactggaaaaatcgtgggctcagcagctcattcgtttatgcagccaaattaacaaaccctagaaatccgatgtgaattgtggaatctgtagtaattactgaactaaccagatgctttttatctcattgctggcgggtggggtggggtgaggagagatttcagtctcgtggctcgttggtctaggggtatgattctcgctttgggtgcgagaggtcccgggttcaaatcccggacgagcccagtttttttactctccatcttttggaaaaagctgtgaagttcctcctgttaagaccccagaaaacagcaagacaagagaagagaggatagcctttccgtgaaagttgattggttagaagtaccctaggaacttctataattggtgcctttgaactacagatccagagactggtcgacccagatctactggatattccgaggtcaaccacacctgcagcggagaggaatttccaactctgaactgagtacccggtgccgcagagcggctaggacacagtgactgtcctgggggagggaggagaatcgcaggccgggaccagggagtacgacctgctgggtggtccatctgcaccacccgtgtgcaccctttcgtcgggcctgaggtcacgcgtgcgacgagcggctagtccagtcagtaggctggcggctctcagcagctgcctcttatccaggttttggcctttctggtgggcgaggagggactcacaagcgggaaatgctacagcagcttcgctataccacaggatgcctcgccgccgactccgtggccgggatcttggaaggaccgtctgtcttgagcagtgactgtgacctctagagcgcgggcttccacgtggcagcgagaatcgccagccaagcaccaagtagcatccgcgggcccagatcaagggaaagcctcacccgcgaactaagggtttctcaatttgtgcgtgatggagagggaccagagcgatagagtccctcttaactacaatctgaattcaaactttcagggcgtgtctgaaatctgactctccttccagctctgtccttcaggtcccgcccctagacgtctgaatggtcataaaatggaccaggagggtaggtttgtgtggctcgttggtctaggggtatgattctcgcttagggtgcgagaggtcccgggttcaaatcccggacgagcccatacttatgtaaattgtaccaggctgcgaacctactatactaaccttttaaagacctaaaactctgcggcccagtggtacttcatagaaaacagctaagtcttgccaggtgatggttgctcacttctttaatccccacacgtaaagtagaagtggtgaatctctttgaggtttgaggccaggctgatctacaagagttccaggacaagaaatgaaagtaaacaaaaacaaaaccagcagcacgtggctcaggaggacaaagttgtaacttttgttttgtttttgtttgtttgtttgtttgtttttcaacacatggggtctagatataagagtcccggctctaataccggctataatggaactaaactgtagaccaggctgtcctcaaaccacgatccgcctgcctctgcctccaaagtgctagaattaaagatgtgcaccaccactgagggtttaacatttaaaaaaaatatgttttgttttattatttattgggggtggggggtagaccaaagaacacatcatggaagtgggttttcccttaccaccatgtgcgtccctggggacggaactcaggtggtcctcccagggaaccagagctgatgaggggagctggagcttggatagaaagagtggcatgttagaatgagagagccctagttccacaagagggtttatttaggtttaatcataggggaaagttgggctagggaaagcctactggttgttagttttgttgttaccagactttgaatctaggagctcaagtcaagcactacttcttccagcagttttctcttcttccttccttccttccttccttccttccttccttccttccatctttccttccttctttttctttctttctttcttcctttctttctattacatttatctatctcgtgccagcgtgtgcatgtgtacatgtatgtgtgtatgtgcatgcatgtgtgtgtgttcgtgtatgtttacgcatgtgaaagtcagtgggcaactttgaggaactggctctgtcctccagttcaccatgtgcagtctggggactgaactcattcatgcttggcagcaaacgcctctaaccacagagccatctcaaagtccctgttttgttttatttatttgtttatttatctatttatttatttatatattttgaggcagcatttctctgtgtagctctgactgtcctggaacacgatttgtaggccagactggcctggaactcagagatctacctgcctccacctcctgagtgctaggattaaaggtgtgtcactacactcaggtcctattttttaagtagtacattgaaatattacctggtacatttgggagtcagaaaagtgattaactaataagttattaatttatattttcttgagggaaaaaaggttctttgaagggcaaagctttcgccccatactctagctatgtcatttgtaaggcttagtgtaaaatgaaaatgcagggcctttcatataacaatttagagattgtcagaggggggtgggaggtggagggtggggaaaggaggatatgggggtgggggtacatgcctttttttcctcagcactcgggaggcagagacaggatctctgtgagtttgaggccagcctggtcctcagagtgagttccagaacagccagagctacacagagaaaccctgtctcaaaaacacacacacaagaaagaaagaaagaaagaaagaaagaaagaaagaaagaaagaaagaaaggaaagaaaggaaataccttgcaaccagattttatggcagcattttctcaattaaagttccctccttccagataactctagttcatgtgtcaagttgacataaaatgcgccagttgcaaggcagtagtgacacacacctttcatcctagcactcaggaggcagaggctctcagatctctgtgatttcgaggccagcctggcttaccgagtgagttccaggacaggttccaaagctacagagaaaccctgtctcggaaaaaaagaaaaagaaagaaagaaagaaaggaaggaaggaaggaaggaaggaaggaagaaagaaagaaagaaagaaagaaagaaagaaagagactagccagcacagcacagcaggtgccagtgatggcaattatctcctcaaagagcattcaagggtatacctctctgcaagagaatatgcactgctagggcacaccctgcatgccaccatttagagtttcacctgagagtgcaaaatgtaaaggcagccatttgtgaagccatggtaaagatgggaacgtgtaaggttcctgccccgatagacctataaacatcaagtagtactgactgcctgcctggaagtctaggctgaaatcacagaaactttcaaagagctggaaacattagaggttacttgcccaacccaagggcctttctacagctggtatgtgacctgtggagatggcagacagatcccagagaagactctggatatagagagttaaataaggtaagcacccccatttataccactgtgcccaccattgttcttttgacaggacaactgaaaaagtcatgatatcttttcatgttgtgttggaccttttctttctttcttttttcttttttgtattttcttggttgctcaattcccaaggctaatttgcatttagaggagcattggggcactcatgcaagattaccttcatacactatctatttggcaagggaagaaggcccaggacctcgttttcttctgcttcctctcctttttgaaaaagtttcactacatacagtatagtctctgaaggatttatggtgtgcacctcaaggaggcaggatgagcagtcagcccacaaaatgcacaagggcagagctcagctgtgaaattcctaggagtatttttttttcccagtaaaatgcatatcacacccaacaacttagctaaaaggtactgtgtgtgtggttggtgccaaaataaatacataaattgctcaagaggctactgagtaagctaagagcctcgaaagatcatttgtgttagaaatcaccagaagttcaggagactatgggaaaaaatgacctgagcaaacagtcttaacagggtttgggtcccagacatggaaagggaaggaagcagtacaccatgctagaacagcaattgctgacgaatgtgaaacacttcaaaaggtgggacccgccaccgcaataacagtgaaggctgcttatctgcctgaaggccacaactcttactccagtggcacagaatcaaacttgccaaagatggcatgcctagttacagcactgtgagtgtggtgtcctgtctctaataccatgcaggctgtgctaggaccagtgttctttcgagcttctgtacctcccccagtgattgtcccaagagctaaaacagataaagtgctaagagaaacaccatctgtttgtacatgcctgctacatggatggcataggtaagggcactaaacaggactgggcagctgatgaaatgcaaatgaacactgacaccgtgtggctggagagagaaagaaagcttagtcagtgggctaaggtaagagcagagtgggtaataccagttcatgagctttaccctgtgacaatctgtattgacagttgttgggctctattcaggaaggtctgactttatggatatcccagtgggaaaagaactggcaagttctggttctaccaccatggggacagcagatgctgaagtttataatggagtttggccagagtcagtagttttccatgtggcagccggtagctcattgagttttggaaatcaggacgcagacgcacttaccaaactatacgccatcttcccccacagaccactggaggcgctttacagcgcttgtctaaagtctggtcacaggctggaaagtagctgaagctaccaacattcccatgaaatattctgatattctgcatgataaccaaaaatgtgaggcatgttccaaattatgacatggagagactatacagggcctgtaaatgtcagtaggtctgcaaatacgtgctcacctgaggacactgccacaagcccactgaaaacatttttggttatttgttgtggaagcagtcagtggggaagcacattggtagtatccaaatcagtattacataagacacaccccacacccagaaaatggataacaattaagggcagtcatttcacaatcactggtgcaaagaactgagttaaagacaccaggactaattctactttcatttgttttacaactctacacaggctatattgattgaaataaataacgggtaattgaaacaaaagttaaacagggccaaacagatggctcagtggctgaaggcacttactgctctttcagaggacctgggtcacttcacaaaaccaacctcatatagatcacaactgcttttaactccagccccatgggtccaatgccttcttctggcctatgcagacactgaatgtacatggtacacatacatgcactcaggcacagacacgcacacattgaataagtaaatgaatacttatgaatacttttatttttactttatttattttgttttttttggggggggataggatttctttgtgtaacagctctaggtgctcaggaccttactttgtagactatactggcttcaaactcacagagatctgcctatctctgcctctccagttgttagtatgaaaggtgtgtaaggtcagtatgtacctttttttttttttttttttgagacagggtttgtctctgtatagcagtcctggctgtcctgaaactcactatgtagaccaagctggcctcaaactcactgagatacacctacctctgcctcccaagtgctaggattaaaggcatgagccaccacctgggccagtatgcactcttagccattgaaccatcccaccaacccctagacaaaagtagtttttaaaagaaggcactcccggaggtcataaggttattgaatgaaaaatcccaatgtcagaagtggacttccctgtgggttgtgggcccctgaggcttcacattctgtaaaggctattgccgttgatatgggttgtatgctggagctggacattacattcccattgcagaagacagcacatgcttttgttgcagagcatggagaaatcaagctgagacggagctagaggtgccttctccactgattggctttcctggttctggaaggcactacacaggctgctgagcaaaattggttgttgacagtccaatttaatgacggacactggactctgtgtgctacactattgtattacttagcatttctattgctatgataaaacatcatggccaaaacaacctgggaaggaaagggtttatttctttttacagctcgtaatccatcatccagggaagtcagggcaggaactcaaacaggcaggagctgatgcagaggccatggagggtgctgcttactggattgctcctcctggcttgctcaacctgcttgcttgcttcctttcttccttccttccttccttccttccttccttccttcctttctttctttccttccttccttccttccttccttccttccttccttccgtccttccttccttccttccttccttccttccttccttctttctttctttctttctttctttctttctttctttctttctttcatttgaattagaaacaagattattttacatgacaatcccagttcccttctccctcccgtcctcccctaccacccccccccaactaaaaccctgcctatggatggtgaggccttccatggggtatcatcagagtctatcatatcctttgggatagggcctaggcccacctgagtgctgcagctggtttggggcaggaccatttctccttagtgttgcagcaagtgaggggcaggtccaactctatacagacctatcctctcccggtaccaggagccacagacatcaacacaaactgcagcagggccatggacccagagtgggtcccagcttcagctcagtactccctccccataatcaccatggaggggggaggagcaagccactcacctcagcctgctccttactgctttaacctcttcacatatgcctctttccgcaggacatgaaccattctgtctttctttttatttatttatttatttatttatttatttattagtatacaacattctgcttccatgtatatctgtacaccagaagagggtaccagatccagatctcataagggatggttgtgagccactatgtggttgctgggaattgaactcagggcctctggaagaacagtcagtgctcttaacctctaagacatctctccagcccttttaaattacttcttttgtgatttttatgttgcttttttaaaattttatttatttattatgtatacaacattctgcttccatgtatatctgcgcaccagaagaaggtaccagacctcataacagatggttgtgagccaccatgtggttgctgggaattgaactcaggccctctggaagagcccaacccccccccccattctgtctttctttcacacatacatttgcttaccataatagttaccagttgcccttgttttctcctctgctcccagggcagactgccaggcatgcatgtgtctccttgtcccactcagtcatagtcttaagatttattttattttatttttatttttattatttttggtttttcaagacagagtttgtctgtgtagctttggagcctgtcctggcactcgctctggagaccaggctggcctagaactcacagagatccacctgcctctgcctcccgagtgctgggattaaaggcatgtgccaccaatgcccagcaagatttatttttttaaggtgtgtgtgtgtgtgtgtgtgtgtgtgtgtgtgtgtgtgtgtgtgttgcctgcatgtaaatacagatgctaccagggaagagggcactggatcccctggagctggagttacaggtagttgtggaccggctgatgtgggtgctgggaactgaactcaaacccatggagagtggaaacagcaagggatgcttggaatttgttttggcatttatacttaataattgctttatggcatgatatgtgctcattttaacaaatttgaatgcaggaaaaacacaaaatccaaaataaaagtcatctagattcttactacccagacactgtgctaatcatagatatatggaaacgattttgtataaacaaattcatgatttcattccgtgacctactgtaatcaagcacagcatgaatcatgccaagtcaataaatatgatgggacgtggtcattatacttgattaacagtgcaattctgaatatatgtattataactcatttacccagttctgtttgctgccaacttttgatgctactgttctagttagctttaaccatcagctttacacagcctagagacacccaagaaaggaacatcaattgagggattgcccagaccagactggcctctgggaatgtctataaaggattgtcttgattgttaattgatgcaggaaagcccagtccattgtgggcagcatcctcccacctaatcaggtgacctgaattggagaaaaaatctagctaagcctgaatgagcagtcagaatgtccatgttttccactttaagtccctactggagttttgctcaacttacctcagtgatggactgtaacttgtaagctgaaataaaccctttcctcccctgtggggggggggcgctaaaaatcaattatggtattttggatacagggcctcaaactctatcccaggagctcgaatctcacattgccttttagatggcagctggttaccaccagatggcttggcctcagtggagaatgtctcctagtttgcctaacaacagacctaggccctgggtgagcccacacctattttgagggcttgtatacatgcctagggactggtgagaggctggtgaagacatgcagttttaggggtgcctctaggattaaaggaaatatttgatatcagctttatacatgataatagatgtcttctgatatcaccccccccatggttggaaagctatttaagaggatgcttgaataaaccatggactccagtctccagcatggactgagagccctcctgagatgacaagatatgtctttgtctcatccttaacaccgcgaggtagctaggagtttccccaggtccatactctcccactcagggatggacccagggctgtttggatggctccaattgcagccccaaagacatcagtccagaatagatggcctctgtaacataggactgatacaggcagaaccctggctctccccttcatttctttttgtcagagtgtttatcacagcaacagaaagcaagtagtacaggtaccaatatgtgttatcctcaactcatagctcacagctcacaattgttcagctatttgatggtgcagaggtagtatgctttcaatagaaaccacttctggattttgatctttttcccaggtgtgatagctttctgacaaggtgttgtgaatgtaaatcatgttaggatttctgctgctatagcaaaatacatgagtcgtatacatttatataaatgtacacagagagaagtttcattttggtccacaattctggaggtttcagcccatatctgaataggccctgttgctttggacttgcagcaagacagcacaccgtggcaaggagagcatggcagagccaacctcttcatgatggaaagaaaagagggagaggggcctagcttctttttagccccttcaagtgcacaaatgaaccaaaagaccccattgcataactcccacctcttctaagtagcatccagttagaggcaaagcctttaaaactacatggacactcaggggcattcagcatcaaactgagcaccaagctaagaatatgtgatagtgcttgttcactatgccgagtggcagctctcaggcagcatgagatcaagatcaataactgatgctgtgaagtatgctgtgttgtcagaccatgaggttggtgggtgtattagttatatgtggttttattggaatatcttacaggctgatgtccaacaatgactattgtgaatgggaagtccaagaatctggtagctgctctaggcccacagggctgggtgtctcagctggaatggatgtgctgacaaggcgagggaaaataggagaagggtgagcacatccttccttcttccattattcttatataggcttccaaaggtctacatgcatgtctgtgtactaagtgcatgcagtgtctgtggtggccacaagggggcattagatcatctagaactggagttacagaccactgtgagctatcctgtgggtgcaagaaaacaagtctgaggtgctcttagattctgaaccacctcttcaggccctaaaagcatttttgtttctttgagacagggtctcactataccgttctggttgtcctggagctcactctataagccaggctggccttgcactcatagagattcacttacttctgcctcccccaagtgctggggttgaaggcatatgccaccactgccaggcctttttttccagcagtttttttcaggatacaattcccacatttacataagaacactgagataaatacttttgtgcatatatctgtcaccatttttaggtgtagaagccatgacggaggtctcagtgctcacagatgagcactaggggaaccataaacactcagggttgttccttgaaaggaaggaatgcagtatatgttatctgcccagaaagcagagagtggacatgctctctagcttgctgacttctgctctacttgagtggtgggagattcttccagcaccatcagatcctctccagatccttcttgcaaatttgttttccccagaatttatagaacccatctttatggactttaaaagggttttgatgcagtcatgtctgttctatatttagctttctttgttccccaaagagatttatgtatgctttgttgtgaaccagggatggagctaatcatcactagaataaattttgctaaattgtgctatgcttaaatagccctaaaataaactacttggggtcagactcccaaagtttgaaccaatactggcatctgagtcctgttaaacctaacttcattcttgcctaccttggatcatcacattcctggcctcggaggtcacagggagagacccctgcatttaagaacattcatatatgccaggagatggtcctgcataactttaatcccagcacttggaaggcagaggcaggtgggtctctttgatttcaaggccagtctggtctgcagagggagttctaggacagctagagctacacagagaaaccctgtcttgaaaaacagctcttaggagctagagacaaagctcaacagccgaaagtccttattgctcttgcaatatggatatagcctcagttcccagcacccacaaccattttaactctagttctagagaatttgacgacattttctggcctccaagctcaccagacatccacatacatacatcatttatctatttattgctttttttgagacagagtttctctgtgtagtcatggctgtcatggctgtgtagtcatgaactctcattgtagaccaggctggccttgaacacatggagatccacttgcctctgcttctggagtgttgggattaaaggggtgtgctaccactgcctggatagattttggtttttcaagacatggtctttctgtgtagtcctcgctgtcctggaactcactcaacaccacatctcaaatatgtataacttttaaaataaataattatttatttggatggctggcatggtggcatacacctttaatggtggcagcacctgggaggcagaggcaggtggatctctgagttcggggacagcctggtctacagagtgagttccaggacagccaaggctacacagagaaatcctgtctcaaaaaaccaaataaaataaaataatttgtgtattttaactggaaaataatatttgtgtattatctggggtctatttgtgttttttatctataatgacatggtagaaagagtcagtcaagctatttaccttgcctacttttatttttaaggtgagaacaacaaaaaactattgtagcaatttagtcctggccactagggggaagagtggaaagccaaaaatttcagatgtcttccagagatgtgtcctgtaattaagtggtgttagcttctcctgtaataatagtaccatagagacattcttctctgtttctttcatgaaagattgattttaaataaagtccattccccatgcacacacatttctctctgaaaataatgtagcatgttgagtcaaagaggtagatacaagagatcatatattgtgtaattttgttaaatgagacatccagagacgacaaaactgtacaggcataaagtagattggcagttggatggtccagaggctcaagaactaggggtcacagttctctctctctctctctctctgtgtgtgtgtgtgtgtgtgtctctctgtctctctgtctctctgtctctctctctgtgtgtctctctctgtctctttgtctgtctctgtgtgtctctctgtgtgtctctctctgtctctctgtctctctctctctgtctctgtctctctgtctttgtctgtctctgtgtgtctctctgtgtgtctctctctgtctctctgtctctctctctctgtctctgtctctctgtctctgtctctctgtctctgtctcttgtgtgtgtgtgtgtagggttgctagagacgtagctcagcaattaagggtatttattcctcttacagaagacttaagtccagtttccagcatccacgtagtggctcataacaatctccaactccagcttcaggtgatccaatgccctcttctggcctctgcagacgctaggtacctatgtggtgcacagacatacgtgctagcaaaacacccatacacataaaataaaccagaaacaatggggcctggagagatggggtggtgttatgagttctggatgctcttccagagctcaggctcagttcccagtacaacagcagataatagtcttctgtaaatacagctccaggagagatgatgccctcttctggccgccacagccaccaggcatattcttggtacatgcacacaggcaaaatgcccattcacataaaataaaagtaaagaaagttttaacataaaaataaaaatgattcgaggccagtctggtctccagagcgagtctaaggataggctccagagctacacagagaaaccctgtcttgaaaaaccaaaataaataaataaataaaataaaaataaataaaagcatgttattttctttcgtaggaccttacaaaatgtggggttttgtttattggtttgcttttgtttttttgttttgttttgttttgaggcagggtttctctgtgcagctttgtagaccaggctggcctcaaactcacagagatctgcctgcctctgcctcccgagtgctggaattaaagttgtgcaccaccgcctggctcaaaatgtattttagatgtgaaatgttccccgcaaggcttatgtgtttgaatacttggtccccagctaacgatgaagtttgggaaaactgtttgtagttgggaaactgtagttggagcgctgggagaggaagtacatcactggggctaggctttgaggtcttgtagtccagactcacttcctgttccttgttctgaacactgactgctgatacaacgtgacaagctggcctggtgtgatagactgtatctctatggaacggtaagccaaaataaattctttctcatttacattgctttagtcagaatattttttaatgatttatttatttattacgtatacagtgctctgtctccatgtatgcccgcaggccagaagagggcgccagatctcattacagatggttgtgagttctattgaactcaggacttctggaagagcagtcagtgctcttaacctctgagacatctttctagtcccctagccagaatattttatcacaacaacagaaaacaagacaagagtattacttgtccaaaatccagatcttactttattccctagcctatattttacattcctgatgattaaaccggaaattacttcaaggaaatccctggaataaaagagaatatgttcaaaccattcaaaggaatggaattttttaaagttaattagaattggccagagggggaatagaatcaagtaatatctgattcttaaaaagccaaacgaggtgaaaggaaatagttacgattcaactatccatacatcatgtctggacaccttgcagaactatttattatttgtatatgggagaacaacagggcttcctctgacctcctgtatccaggagaccaatgagagggaaagctgatggcttcctgtggtttttgttttctttagtttttttttttttttttttttgaagaaagaagggcatggttgaactcagaacctcatgctttgcttgctaggcaagggccctactactgaatcagagccccggcatttgctttttagtctgggtcagggtcttactaaattgttcaggctggccttgaacttagaatccttttgcctcagcttcctgggtaactgggttggcaagcctgtaataccaggcccagttactatgttcttctgtgatctgactgtggagtctactttagctgccacattctgcttccaaatatccatgctgactggaggcaggccttactgccttaatctttcgtggatgtggagagtgcagtcctggattgtataccaggatggcctcaaatttagagagctctcctggcaggtctttaatcccagcacgcaggaggcagaggcaggatgagctctttgagttcaaggccagcctgatccacatagcaaattccaggcagccaaggctacatagtgagaccttgggaagagaaagggaaaaaaagagagagaaaatacatatccaaatatgttgcccttctgaccgctacacttattgcacacatacactttggcacacatagacacacatacatacctaacaaataaatgctttacaaattccataaatacaggcctttaatcccagcactcgggaggcagaggcaggcagatctctgtgagttcgagaccagcctggtctacaagagctagttccaggacccactccaaagccacagagaaaccctgtctcgaaccccctcacccaaaaaactcaataaatacataatgcaatatatgataattatataatgcaagtttattttatttatttggggataataatgaaaaaacagaaatagattatagtaggaggagtaatttattttcaaatattcagaatatcctctgaaaaaagccaagaggataaaaaggagaggggaattgaggcagactatgggcgggagtggtgactgtggaaaaaaaattaaagctaacccctgatggctatgcatgtctgcaaaaacagcacttgggaagtgaaggcaggatcaggtattcaaggctatcatcagctgcacagcaagttaaaggctagccttggctacatgaaactctgtttcaacaaaagaaaaactaaggaagtgggctggaattgtaacatatacggtagatcatctatgtagtatgtgcaaggccatgggttcaacttttatcactcctttccccaaaggaaacaaaaacacccactggaattatagattgtgggtcaacaaataaatgatggctagtggaaaccattaagatggccagctggtggaaagtgctgaagcctgcaagcatacttttcttcattttgcttttaaattctaattacacttatttatttatttgtgtgtgtgtgtgtgtgtgtgtgtgtgtgtgtgcatgtgccacagtacatgtatggaaggaggtcagaagacagctttcagaagttagtccttttctcccgctatgggagtcccagagatcaaactcaggtccttaatggtaacagcaagggtccttctctgctgggccatctcatcgcccttttattttccccacatatttttagctagaaaattcatccacagccggggtggggggcggagaggatgcagacagttgcgatgatggccaagtttgaacaggagaaattctgcttcagattaataggtacaaagaaacaggaaattaacttttggggagaagcaggaaatacccggtagccgaaaacagtcaacaggaaagtaagaatgaaggcagccttagaaaaccaggcctcattactgtcctcacgaaatcctcttttgaagatgcctaccattggacaaaaaccaatgggcttgcaagaacttacgtaagttctcacagtaactttattttactgatttttcttgaatgcgttttaaggtatactatgacacggggtgtttgttcaactagaggagagctagtcactctgatatgaagagtcagttttgaaaatagctgggaacatctcttgagggacagtgaagctaaactaattcgaagcggcagatgtattcacactgggatgcgcctggcctgcgggcagcagcagctcttacataagctgattaggttgagctgcttgctggaccgttcagagctctgctgaacccacgccctgcatttgccctctctggtttagtgaagacacatcaagggcagtggactagaggagaacaaaataataatacatcaataaatatcatgtctctcgaaaataagtgaaaatcccacttagaatataacaaatgggctttctactgagaggggaaacataggctcactctttttttttttttcttaaatactcagtttgaaaataaattctatgtatattggtgttttgcctgcatgtgtatatctgtttcaggatgtagattccttaaaactgatgggtgctgggaactgaacccagatcctctggaagagcagccaatgctcttaaccactaagccatctctccaatcttacttctttaggcaaaacgtttgtatttgtatttgagaattctttagttgggcacctgtataatctgaggaaagtttatactggaagttataattattttagtgaagttattttttttttcaaaatttaaccttttcaaatagatttaggttgaatgccatgaaatttctgatttcttttttatttctacttttactttttctttttaccaatcccagttccctctccctcctgtccttccattcccccccaccatctctccattcctgcctccccattcattcctcagggagggtgaggcctgtcatgggggaatcatcaaagtctttcacatcatttggggtgggactaaggccctccctcctgtatctaggctgagagagtatccctccatagggaatggactcccaaagcccattcctacactagggataaatactggtttcactgccagcagccccatagactgcctaggccccccagctgacacccacgttcagggggcctgaaatttctgattttgtagccaataaatgatgatattattcagtgttctataacagaccagaattctaaattaagtcctataatttcatccaacaaactttattttctttttttttttttggggggggttcaagacaggatttctctgtggctttggaggctgtcctggaactagctcttgtagaccaggctgggcttgaactcacagagactttgttttcttttgaggttttgtttttcgagttaattttgttgtttgcttgtttgtagacaaaaatctcacagtgaagcccctgctggcctcagacatgagttttcctgggatgagattacaagcatgggccattatgccccaattcaacaaatgtttttatttgtgtctcagtgtttgtgtgtatgtattcttacatgtatgccattgtggatggagtttactgttccacctggtcctgttgccatttagccccaaataaacacacaggagactttaactaatggttcaggcttcttattgactagctctctcttaattgttaacccatttctatgaatctaagtatacccacgtggttttatcttatcagagaatgtccagacctgctactccttcctctcttgcagcctctctctgcctcctctccctagaattctcgtggtctggtagcccagcctatacttcttgcctggctactagccaatctgtgttttattcatcaaccaataagagaaacatatatactgaaggacatcccccatcatgctacaacccatgtgtagtagaggtcagaggacagcttgcaggagtcagttctctttttccatcatgtggatcccaaggatagaactcaggtcattgggcttggaagcaagtggctttactcgaggagtcaggttacttgtcctcaacaatcatttctgacagccttaatataatctttattctttttttttaagattttatttatttattatgtatacaacattctgcttccatgtatatctgcacaccagaagagggcaccagatctcataacggatggttgtgagcctccatgtggttgctgggaattgaactcaggacctctggaagagtagtcagtgctcttaacctctgagccatctctctagcccataatctttattcttgagcaatttccattttaatctcggcactcgggtggcagaggcaggcagatctctgtgagttcgagaccagcctggtttactagagctagttccaggatagccttcaaagccacagagaaaccctgtctcaactgcccccccccccccgaaaaaacccaaaatgtaaatgagtgcaaagcagaatgataagtgctatggtagagacaagtataagatggcacagtaggagatgtggctgatttcactatgaggagaagaaaggttttgcagagcagaaggtggctagctgtttgatttctgttgtggtggtaaaacactctgaacaaaaagcaactggtgagaaaaatgtttagcttgcaggttatagttcattgtctagggaagccagatcaagaactcaaggcaaagggctggagagatggctcagaggttaagagcactgactgctcttccagaggtcctgagttcaattcccagcaaccacatggtggctcacaaccatccgttatgagatctggtgccttcttctggtgtgcagatatacatgaaagcagaatgttgtatacataataaataaataaaatcttaaaaaaaaaaaaaaagaacttaaggcaagaacttggaggtagaaacagaaaccatagagcaacccttcctggcctgtttccaggcagccgcttcttttctccttctattttgtttttgtttgtttgttttgtttttgttttttcaagacaagatttctttgtatagccctggctgtcctggaactaattctatagacaaggctgaccctgaactcagagatctgcctgcctctgcctcccaagtgccaccaagtctggctttcagcaagcttttttctttttgtttgttttgttttgttgagacggggtttctctgtgtagccttggctgtcctagaactcactctttagaacattagcaagctttcttatatggctcggacctgccaattgggagtggctccacccacaatggcccaggcctttccttgtaaattagcaatcacaaaaccatggagcatctttccagccccccacatatgcacaattgaggcataaatagggtgtcagtttcagaactcatgtgaaatcattttggatgtctacattgtggggaaggaaaatggttgaagactacagggaaacacaataaccaaaataagaggttttatttacttatttgtgtgtgtgtgccactgctgagaggtgcatgaggtgatagtggggaggggtgcatgtgtggagatcagaagactactaggggccgggcgttggtggcgcaggcctttaatcccagcacttgggaggtagaggcaggcggatctctgtgagttcgaggccagcctggtctacaagagctagttccaggacagcctccaaagccacagaaaaaccctatctcaaaaaagactactaggtggagtcatttctcttttaccttttcatggcttcctggtattgaacttaggtcaccaggcttgctcagcaagtatattcacttagttatcttgctttctcggatatatcttgctgtccagtgctattaaatagatatggagcctgccacaaaattttatcatttcaatcacatagtatggaagggaaatgaggtttttagctgggagatatatgatcaaatccacactttaggaagtattagttgctttgatatatagttcaaatttgttatgttttggtttttgagacagggcttctgtgtgtaacagctctagctgtcctggaactcactctgtagaccagactggcctcgaactcacaaagatctgatccgactgcctctgcctcctgagtgctgggattacaggcatgcggctgccaccaccacctggcttaattttttaatattagttactttccttgtagttgtgccaaagtaacaaatgtaaaatgaggaaagaagggtttgtttggctcagggtttgagattacagtctggcattttagggaagttaggaagccagagcttgaggtgattgatcgcattgcatatgcagccaggaagcaggggagccagtgctgtcaactgctgagccatctctccagccccataaacaccttaataacacaatacagtcactgaaagactgaatcagtccctgcccatcttggctcaaaacaaatttaacaatcaggataattggtcatgctagttggtttctgcttgagatagatttgaccacaaccttaataaaattttctgttctaatggacgagtgaaaacatttctaacatgtgaagaaaagttctgggcaagcaatatgacttagtaggtaagtgtttgcaaccaaaacctgatgacctgagttcaatccctaggacccacatacggaaagagagaactgactcctgtaagttctatctgacctccacacatttagtgtgtgtgtgtgtgtgtgtgtgtgtgtgtgtgtgtgtgtgtgtgttgtgttgcagcacatatgaggtcagtgggtatttcacaggaatgtttggctttatgcctggcagaagcaaagctgtgggtttgattgccaacactgcaaataataatacaataatttggaactagagagatgatggctcagagcttaagagaactggttactcacccgagcggtggtggcacacgcctttaatcccagcagaggcagaggcaggcagatctctgaatttgaggccagcctggtatacagagagagtgacagaacaggatccaaagctacatagagaaaccccgtctcgaaaaacaagagagagagacagagagagctggctgctcttccagaggtcctgagttcaattcccagcaacacatgtggctcacaaccatctataatgagatctggtgcccttttctggtgtgtaagcatacatgccagtagaacattgtatacataacaaataattaataattaatttttggggggcggggtgggttttgagacagggtttctctgtggctttgtaggctgtcccggaactagctcttgtagaccaggctggtctcgaactcacagagatccacttgcccctgcctcctgagtgctgggattaaaggcgtacactgccaccaccatccagcaaataattaaatcttaaaaagaaatacagtgatttgttagtgttagtatttatctcatcagtgatcaaatctctcagctaatctatgaggggtttcagcttgtgaaatgtctctaacaagctcctgtttgtacagttggtctcccatcactggtgctgtattggggccagtgtagcctctgtgcaggaagtgtgtctctgggaaccagcctcagtggacctacattcaaatgctgcttcttatgcaatgcagccatccccagcccaagtctcattgtcgttttacatacataggtttcatgttgttggtttgactgtagaaccaatctcacatctggtattagctacaggcagggcctaagacagggtggttgaaggcaatgggggaagtaggaacagaaggtttaccacgagtttacagttggtaaatcttcgtgtagggcacatgatgttttattacactcttcttttgtttgaggtttttctacaacagagtattgaaaagagaagttcacatttaaggtttgctttctaagacaagagaacttccttttgtgaataggatctgtagcactttggtgatgtgtcctgtgactattaggaaaacttgctatgcacatagcactggctggcctggagctctctatgtagagtatgtagagtatgtagagtaggctgagctactcaaagagattctgcagcctctgtctcccaagtgctgagattaaaagtgtgcaccaccatgcctggcttgccaaacattcttttttaaaattttatttatttatttatttttcctctcagtccttcattttatctttccctagattttttttatttaaattagaaacaatcttattttacatatcaatcccagttcgctctccctcccatcctcccatgctcccaaccaaccttccatcccatcccccttctgcgccccagagagggtggagccttccatggggtatcatcaacgtctgtcatatcatttggagcagggcctagggcctcccctgtgtttctaggctgagagagtatctctctatgggggaatgggctcccaaagtccattcgtacacttggaataaatactgatccactaccagaggccccatagactgcccaggcctcctaactgatacccacattcagggggcctttttaaaaaatatattttatttatttatttatttattgagacaggatttctctttgtacccttgactgtcgaattcactctgtagatcaggttgttctcaaactcatagagattcacccgcctctgcttctcagatgttgggactaaagtcatgcaccaccacccagctttatgttttattatttttatttatttatgtatatgtgtatctgtctgcatatgagtagggacagagggatgtcagagcccctgaagctggagttactggcagttgtgagctgccagatgtgtgtactggaagtagagttcagatcctcggtaagaacaatactctcttaaccactgaaccatctctctaggccaggtgccaaacattcttgattgatagcataatgataaacatcccggctcttgatttctgagtcacagaaaccagccctggaggctttgttgtgtgatgacagcctctgtccctgaatcattgtcaatcagtgtctctcctttgcagaagaaattatcccaactaaaatagtaacaaagagttgtgcagaggtggtgcataccggggacagaggcaggcggatctctgaattcaaggccagccaagcctacagagtgaattccaggacagtcaaggctacacagagaaaccctgtctcataaaacaatatgataaaaataaaattaattacaaaacaaagcaaagatagtttctgtagtgcttctgtgtgtttgtgtgtgagtgcactaaggagtgtgtgtgtgtgtgtgtgtgtgtgtgtgtgtgtgtgtgtgtgtgtgtggtaaataaggagtgtatctgtgtgtgtgtgtgtgtatgcactatgagtgcatctgtgtgagagtgcactatgagtgtatctgtgtgtgtgtgtgtgtgtgtgtgtgtgtgtgtgtgtgtaccggggagtacttctgttacatctcagatgattcagtgaatgatcacctctaatccatcaggtctcagatttatggatctcatgaagaattgatactgagacaaattaagaggcaaatacaaggtgtcagtcggtcctcaaagtcgtgattaagccctgtagtttctgtgtctctacctttcaaatcccaggggcattagctggtcagtctataaatttgatccatctattcctttctaatctagacacacccaccgccaatcatccgaggtaaaattccttggatgcagaggttcctgagcaccgttactggaagaatggagaatggggagagggaagcaggaaagagcaggaaaacgtgttaagcaggatgtaatctctcccagggactagcttcagttctgaaagaggtagagctctggggcactgtacttgagctggtcccatcttttatcctgctatgatggtcagtcattggttaccaactgcctggagtgagggagggggctggagagggacgtgaatagtcatagcagctgggagcaaatgttcccagttaaggggatcaaaaaaaaaaaaaaaaaaaacgtcatcagctgccgcatttaagtctagtaatgccccaaatcttgcataactctgtgttatctaggccatctccccctaccccacccgccttctctcttgaagcaaggttcttctatgtatgtagctaaagctgaccttgaactcatgaacatctatcctcagactctgagtgctaggataaaacgcatcatcattgtgcctgggttcacccactccattcttttctgggacatctccagaaaaggacttactcctcttcacgcatactggtcacctcaaaattccggaatttcccagcatgctttggctgcagatcatttgtgcttttttgttccctcacctggcatgacttcccctccagacaccttcataaaaagacttgctctggctggctatggtggcacacatctttaaatgtagcacttggagagaagctgctgttgccaataaagggccacttcccaaccccggtgcagtacttggggctgatacccaaggactgggtgaaggtcatgactgtgaactacaacaggcacagggagctgggagaaggtgccagattctgaggagcaggtgctggtagttgtggagaccaagagtcaaaaagagatcatggagcacgtaaagaaaatttggggcaagaaagaggagaccctgagggaggaggagctggagaagcagcagcaatctcattcagccagccttgctcccccaccctccttagtactgcttgcaggaatgccccgtgggaagtggaaggtcaggtacgctgccctggcctggtgcctgctctgaaagctagcacttaggtctgaggaagatcattgggatggactgatggagctctgcaatggaaaggcctgatagcacgcccatttaaaggacatagggagaaggccagggtcaccagctgctgaacagatgtccataaaagatttagtcttcctgtttaaaaaacaaaaaacaaaaagcaaaacaacaacaacaaaaaatagcacttgagacactgaggcagggaaatagaatttgaaggttagccttagagctatatagtgagtttgaggcaaaggctgtctcacagaataaaataagactttttttttactgtcatatctaaaatgacaatttcacttccagctgaaacttgaaaactctacttaatccttatatctaattttatttgtcttgttatctagtctaaataatatttgtattatctaaaatacaagccgaggatcactcaaaacagtggctggtaggctgaaggcactctgtgagtatttgctgcatgcatacatgcatgaatgattcctggcaggaagtgtaaatcctcagtaagcactgaactgaaccagaaaagcatgtaccctcccttatataacaaacagggaaagggcagagctctccagagccttgctcttccttcagtaatattacaaagcttggtctctttgtgagaggatgtatgcatggaggttaatgtgtaatatatgtacttctatatgtacattgtaagaatagaaactccaggcctggtgagattgcggctcacacctataagcccaatacccagcaaggctgccagcctaggctaagtagtgagctctaggtcagcctgggtcatagatatcgttatcctaaccacaagtctccctcccccaacaataagaaagaatagaaacacttaagatattctaattttatttaaatgagttcacatcaaactcaatagtccagtcttacacataacaaagagaaaggcagagcagaagtcaaagagatacaggttgcacagataactcaatttctaaaaaggaaaatttaaacccaaagttaatcctgtttaagctctttacacagcctgatcttagagggtagaaaactattaagacatgtaaaatatcaaaccccacccaaacatctattagtaaaagccaaattctttaaggtatattaaattctagaaagaaggtctaaggctgctaaaaatacaaaagcaactatggaattttacagatcagccttggggtgaggctgcttctgctgtgacctcggtttcttactgtgaatcacactgggcagagggttctgagcccaagggagggctttcttctagttcagcactctcttcgcagctctgcttcccatcggtatcctcggtgctgacatcagcctggtcctgagctgagctctctgcctctgcagtggcttcaggagctgtgctctccacctctgtagtgggttcaggacctgcgctggccacctcttcagtgggttcaggagctgcgcactccacctctgcagtagattcaagagccgagttctccacctctgtagtgggttcagggactccctcagtggtctcccacgggcaagtctcggtgatcttcagctcaggctcctccctcaatatggacgtctccactagggcatcctcgccagggatcagggaggcccctgaggcaggagactcttctggaggcccagctgccaactctgggacttcttcagcatataccaattcaatttccttttcagaaatttctccaactcctgaacgtgctttcccagcttctgccacattctccttttcgcctttaggatgtggttcattaagcaaagtattaattggaagaacatgggaatagagtggaataatgcaatcagtttattttatttaaattcaggagaaggggacattttttgagacaacatttaaaaacagccttgcttagtcatgaatctgccatgtaacctgggatgaccttcaactcctgatcctcctgctccattttccaagtattgtgattatctttatcctcccaagccatcctgctggctctaatactgtttcctagtaccaaaataaaaaattaaaactgaatgcccggccttgtggtgcacacttgtcagttccagcactccagaggtggcggcaggtagatttttgtgagttcagggccagcctgacctacatagtgaaagtctgtctcaaaagaaccaaaccaaaccaaaccaaaccaaaaatccacactaccacaacaacaacaacaaaaaaaccctcaaaccaaacccaaacaacctctcccccgaaacaaaacaaataaaaccacaaagcaaaacctgactcctgagctgctaataactctgttcctaaatagtagtgaccacagtaattgatagtaacgtcatagtctagatagaaaaaaaaaaaacgtataatttaaagtaattagcttggcgctggagagatggctcagtgttaagagctcgggggtggggggaagaggtggctgctcttacagagaactagggtttgttgccctgcacccacatggtggctcacaaacatccgtaattcggctctgggggttctctcttctgacctcttcggggagagggggagggatgcagaagggacaggacaggacactatgacaactgggtatatgatatgtagcatacatatctccatgcaggcaaaacacacacacacacacacacacacacacacacacacacgcatacataaaataaaaatgaatcgttaaaaatttaaaaaatttaaagtaagctgtttgaggcaagaaatggatgttagggtaaaactgtaaagtttctgttcccacggtggccattttccaggctcaggggctcaggaatgattcaactcatgtaaagcatactttgagaaagacacatggatggtgctggccaaaaccagaaaaaaaaaaaaaaagcttataatttaaaacaatatggggggagtgaaacgtcaaactgctgagacagatgctaaaattatgcttgcatgaatgggtgtctggtagtagaaataatattaccatacagaagaatggaaactgcctctcagcaagcagaatacagagaaactcgctcatttaccaaatgcactcatccatagctagtaactctaggggactgtgatcttccttcctgagtgaatccctacacatagcaactcttgattaagttactaaagaaatgaaagaaagaatcaagtggtggttcatatctgtaatcctaggtcaagaagtggaggcaggagtatcacaagttcttgggattcatgagacctgtttctaataagtaaacaataagaagttcactttacctgcaagtggctgtaaccctggttttgtctgttctctcacatctgtgacacgttctgtatgtctgacttgctttgatgtgacagccttgtaagtctgaaagaaaatgtgtgcttagctttctttctccctctctaagattcatcatattcaattccctatgcaaccaccattagaagtttcaagaacaatttcagtatcgcacagaagagaaatcaatgcctgctcaccacttaaaccaaccccctcttttggagacaaacctgtctccataagggtcctttgctggtctggaacttggaatgcaaaccagaatgaccttggactcagagcattggattaaagctgtgagctagcaagccaggcacatgaattctttaataggtctttaagcacttacataatatccaccagcactgactgtcacacctacaaccaggtaataaatcatattggacccagatgttccagggaatttgctggatgacactcgacgaagagatgctaggaaaacaaattttaaatatggttaccttcaccacataagtatgggcgtcttcagtaattacagtttttggcatttttttccttagtgaacttggaacctattaacacagtggattttcactttagggaacacagcattagaggtgggggtagtaatttcatccaaacagcctctagtctatttgaggaaagatttcgaagcctgccatcttgatattaaacatcagtatgggaagatgcagatgaggagacatgatagagaaactaaacaagcttagtggccaaatgaaatgcaaaagaaatacagtctcccatatatatcccaaacagacatgagtagaagtaattattttccttttttcctgttctttcttcagctgtccacttgagaaagaaggaaatgattgctttaaaaagttaattaagtacacttatacctaaagataaagcttgcacttaatgatgggtggaacacatgcttagaatgcactcgaccctaaggcttgtccagaaaagatctcacttcttggctgaagccagtcaaactctcttgtctcagccccctgaacacagggatcacagccacatggctggtttgcagtgagactttctttggcttaaaaacaaatctgtgatctggatgtgcatgccctgagcccacctgctgaggacagtgtggcgggggatgtctagaatctgcctctaccccataatgaaagttcactttttcttaagtttaatttagcatgtgtgtagaggtcagatgacaactcctgggagttatttttctctttctgtgtggatcctggagataagattccaggtcatcaggtttgataatgagcacctgtacctactgagccaacttactgacccaaatctcattgctaaaagaaacaacccccccaagccccaccacacatatggtagatcatgtgtctaatatgcaggaggcctgagttccatccccagaaccaaaaataaataaataaataaaataaaaccaaaccaaaccaaaacaaaacaccttacaactttcgagccaccatgtggctgctgggaattgaactcaggatctctgaaagaacagccagtgctcttaacctctgaaccatctctccagcccacctcacaactcttgacacttgtttcttatttgttccaggattttttttttttttttaatactaggagtcaaacccaggggttcttgcttgctgggtaagctatttcgcatgtactccagacagatcttattaagtagggagaaataaaattatcagtaatgggatgtggtggcccatgcctttaatcccagcatttgggaggcagaggcaggcagatctctgagttcaaggccagcctagcctacagagggacttccaggttagtcagagctacacagagaaaaacctgtcttgaaaaaacaaagaaaacatcagcaatacaagtagacttaaaactgtttcatctgagttatttaaaatagtgataagagaactttccaataggaattaattaaacatattttagtagacttatacaatgtacagactaggatttgcttatatgcgaaaaattttatttttttttagatttattattttatgtgcatgagtgttttgcctccatgtatgtatatgcaccatgtgtatgcctgatgtcctcgaaggtcaaggtgggcttcatgttccctggtaactagagttacagattgtttcaagacatcttgtggatactgggaattgaatccagatcctctgtaataacaagtcctctggattgctgagacagctcttcaaactacaagaaaattctgtcatacattatgtgaaaatccatagcaatataccctgtggcagatcttagatctaagaagaaaaagatcttcagttgttgcatgtgctgactcacaccttagtgtcagtacttgggaaggtgaggcagggggattgtttcatagcagtctgggtatctagaccttgtttctataaagcaaaaacaacacaaatctctaaaaccaagtagattaaccataaacaatgatatttactgaatggaagaattagaagtgatttatatattatatttggtcttcctggtattttcccaatgaactagtctaagcctaagctattcattaaaaagctaaatttttgaaaagccaaaaaagttacattttgcagcaaaaagcataatcaaacttaatgatagttaaaacgtgtctttcaacaacaacaacaacaacaacaacaacaacaacaacacactgaaacaaagctattttttaccaaagtaggaaatactaataaaacattaatcaatgcccacaaaggaagacacgtttaagattccagtcaatgccagattggtggtgcacgcctttaatcccagcactgggaagcagaggcaagagaatctctgagtttgaggccagcctggtctacagagtgagttccaaggcaactagggcaacacagagaaaccttgtctcaaaaataggtagatacaaaaatgaatgaacaaataaaagtagtgattatggctgtggctgtagctcagcactcagtagaagcaaatttgcctagtaaagtgatgggccttagattcagttcttagtaccataaaaaatgaaagcaattaagtgaaattagatcagtacccttgcacccaggacttctaacgcaagtttagaatgttaacactgccattaatttgatggagaatggggggataggggattaaaaaggtgtggtgcagatgacaggactctgtgggtataggtgtctgcagccaagcctgaagacctagttcagtccctgagacccactgactcttgcaagctgtcctctgaacacatgcaggctttggtgagtgtgtgtggtgtgtgtgtgtgtgtgtgtgtgtgtgtgtgtgtgtgtgtgtgtgtgtgtgtgtggtcagttgactcatctttctccttctctgaatatcagaacagccccatcaactttagcttaaactaaacagcttcttcctacctcatcagtgatgaaaatggctatcttacgaggtatacagagaggggaagtcatcttaatacgtgtgtgaagacttctttcaagtagcatttaaaagaacaggtggatagatatctccctctcatcctccaccatcaacacaggcctaatcaaagctggggagacaagtggacaaaccaaaccagaacaaaaccaaaaaaaacaaaaatcaaaccaaaacaacaacaacaagaaaccctgtggctcatgaaattttttctatctctcgcttaaatcctcgctctggatgctgcctcggatgcctcagggagttgggtgaagcacagcaagaattaactttctgtgcctcagtcagtgatggacaaggggtgggggtggggtgggggctgaggactggaactgactctgagaggaactgcaaacagttccagatccacgggtgcgacacttattaagcacctactctgttccaggaggcattactcggtgctttcctcttttgaaaatttccacgagcccttcctcatgaattccctaatccaaagttgatgaagctgtgagcttctcagcaacgccagaacaatgacccgaggccacccacttcggagggatgctcaggactgggagatcccagtgttcagcaccacctgtgttcactgcacccagactgcgcctggagcccacttgctagcgtgtggacacctggtgtccacaggtttctttacctcctccgggagcctagagattcattgaatagtcaacgtgggaatctaggagtgagtcagaccctcttcaaagtgatttttcactttacaactattaattacaactcacagccactgtggtgctctcttaaaaaatgaagaaaccttacttgacagagataagactggaacccaggaaggctaatttggattcagaggccaacctggaaaagttccctatttccaaagtttccaaggacttcggagcgcttgcctgagaccctccctcactgttcttcaccctggctcaggcgtctgagactgggtgctggcgggttcggggtgctggttccagcctggacccacagagatatgcagggcactcaccgtccttccccagtggcgtagggcaggggggcgccctcaggggcagcgccagagtcttggatacagccctgcggagatacatcgcccgacgtgcagggatgcagcggcggagcaagcaactcaatctcagggggtagagcctcaggagtgccccgccctggggtggagctctagatcccgtgcctctccgaccggcggcacgtgggagggggttctcggttagtcgccagcaccttggtctcctaatcctgctttagtagtgctgctttcccgcgcctccagcaaccacctcccggcagccgcttaagggctgtatctcggaagagggagagggaatttagaagtaattgttacgtgcatgacccgctctgttccatggagtaactctccttcagaacacgctgggcatatttaggaaatcgcaccagattcagtattcagacacggtttatcctccaggtggaaagccatttcatcccacccttttctaggataaggtagcgggaaactttacaggtgacaggcttatgcctaaagacagcgtaaggtttccccctggcgacggctgagttctaaactaactatggtttccaagaccttaaatacaaggtaaagtgcttacctagcgtgagatcgatacccagcagtgtgtaaaaccaagcaagctggctcaattgagcagataatcccagcactcggggggaggggggcaggaggatcggaagttcaagatctttggcaacataaatttacggacgccgtgggctatatgagaccctgtctcaaacgaacaaacaaatcactaagggtattagttggggggaaaaaaataaaacaaaacctctaattaggtaaaggttactctgcagtagcaagagcttttaaacaccaagccatctctccagtcagagttttgaatcttagtttttcgagacagggtctctctgtgtagctctggctgtcctggaactcgttctatagaccaggctggcctcaaactcaagagatccacctgcctctgcctggaatgaaaggtgcaagccacaaccatcgggtcagagttgtaaatcttgcaggaccgagtgaagtaactgacgacctctgaagcacagtggacgtgaaatgtgctcagccagatgggagaggcagtgtgggcctcaagctcacgattcctccacaccctttcagtctggtgtatgacaatattggttatatctgcctcacctggccatcccaaatgccagtaggctatatctcagggcaaagggggtttggtgggttcttttcctattttaatgagttagtttcaaaaaacagaacaaaaattcaaaaaccccatgccctttggttatcaaaagtgctaaatttctagctgcttcctcagaaccacagcgcagcattttaacgttagttcttgctttagctgactgaaggctcaaacatttccctgaggctcggcttcttcactgcccttgagagaagccttgacatttttctggtctgtttaggaaaacatctagggtcagagatgattggcttagctcagatgacctccagcaaatctttgcttgctggaaaagatactaattttgaaaatattgtaagggttcagtgccaacaatagttattatttcatggcttatgtacagggttgattttaaagtatttcagcaccctgtgtgaaggttcacacttttaattccagcacttgggaggtagaggttagacattttcctgtgagttcaaggccggcctggtctagatgctacataccgagagcctctgtctcaaaaagaaaaaaaaaatgtttttttttttttgaaaaaatgacagccaggaagatgggaaagtagctggcaatcctgaactcacatggtgtaaggaaaagaactgactcttggaggttgtcttctcatctccacatgcccagctatggcatgcacccaaacatatatcctcacacctaaataaatgtacttcaaaaaaatcatttctcaaacaatacagaatgctggaaacgggttggagagatggcttagtggataacagtgcttgttgctcttccagaggactagagggtggttcccagaaccccctctttaactcctgaacacatacacacacagagaaacacataaacataaaagaaagctagaaacaattgaaaagatttttggaaggagggaaaggattttgttttttgagaccaggtatctgaaaccacagtatggatggaaccatgccaggtttgctagtttctgttctccagtaacctttggcttgaagatacccattatcatcacaggtggatctgtgagtgcaagggcagcctgttttatataggagtctctggccagccggagctacacagtaagattctgtgccaaattttttttctcaaaaaatcctttgatctaagtccttttttaaaagatttttttaaatttattatgcatacaacattctgcttccatgtttatctgcataccagaaagggcaccagatctcataacagatggttgtgagccaccatgtggttgcggggaactgaactcaggacctctggaagagcagccagtgctcttaacctctgagccatctctccagcccttgatctaagttcttttgggaatttaggattagaatgattcttgcttcatgtgtcagctcttgatttgaggtgaaaaccctggactatttgcttttccttatcatgtgggtgggggtgggaggcagggggaacgctgaggagtgatgtccacacatagttagcatagctaatactaagagtcttttttttttttctttctgaggcacggggtctcactggcctcaagttcacaatcctcttacatcagtgtgctgacagtgggcttacagcgtttcctgttatggtagaagttctacccccacagcccgggttatcaggaagggctctctctagagttaaaacggatacaaagtacctgcagcctcaaagcctgacatgtgcagattctatttattaaaagtatgcttggctggagagatcgctcagtggttaagagcattggctgttcttctagaagtcctgagttcaattcccagcacccacatggtggctcacaaccacctataaagggatctgatcccctcttctatcatgcagatgtacaggaagagagaaaactcttataaataaatctttttttttttttttaagtatgctttaagtggctggagagatggctcagtggttaagagcattgctgctcttccagaagacccaggttcaatttccagcacccacatggcagattaaactgtaactccagttccaggggatcaaacaccctcaaagacatacataaaggcaaaataccaatgcacatataaaataaataaatctttttaaaaaatgctctttccaactaaaaccttctgcttccaaaattgcaggcatcttaatgttttctgagcttttaagtgctttgcatgtgtgtgtgaaaagtgctattaatttggagttaactgactttttggcctcaatttttatgtgatagcaccagtttcctataggtgcgctagcaaatgaagcaacctgaaacagcatgcacttattaactcgaagctttatgggtgtgtctcactggccttatatcaatgggagcactcacttttttcttgatattctttagctcttaacctccctctaccatcaaacccagaaatggtggagatggagctaaggggtgcttgtatggtaggtgcacggccctagatttgtcactcatatactatagcaaacaccccagcaatagcaggttagactttatatagccatttgtaaagatctgtgtgatgactcctggatatcccacgtaattacatctcaaggttgacctactggcgactctaattccacctgccattttaactcctcttggtcacagagtctaacatttacacatgttctagggaggacttgactttgttggacttccttcctgacagattgctcttctctgttactgcatttgcatgaacttgatttacaatctgccaagtttttccctccaacaggaatccaaactgacacacacaagctaagttactattaactttgacttttcatggcatctgtgtattttcaaatactataattttgaatttttgtacataagtgacatcaaaagacactaggccatgctttttccagcccctaaacacatgcaatgccaactataatggtcttcacagcagaaattatttaaagccattatctctttctccttttatcattttttaaagattttatttattatgtacacaacattctgcttccacatacatctgcacaccagaagagggcaccatagcccattacagatggttgtgagccaccatgtgggtgctgggaattgaactcagtacctctggaagaggagccagtcagtgctcttaacctctgagccatctctccagccctccttttatcatttttatgatacttgtgattaaacccagggcttcacgaatgctagccaagggttttattactgtgctatgtcttcagctttttgagacaggaccttgttatgtagtcctggctagtttcaaggtcaccatgtagtgccccccacctttactcatttttagtttactgctaactatgtgtgttgtgctcagtggacaatcttgtcaactcttttctacctttttgagaagtctagagatcatactctggttgtcaggccggcaagtgcttttctcactgacaattttgccagcttagtccccttcttaaaaaacctagttcgctgtaacttgactgaaagccaatggaaaacttcatgtggccataaaagtgagtagaaagtcactatggggttagatggcttgcatgttaggagcactcgctgttcttgtggaggactggggtttggttcctagcacccacacggagactcacaaacatctgtaaatccagtttcagaggatttgatgccttcttctgaccttccagggcaccaagaatggatattgtgtgcacacacatgtaggcaagcactcctcattgacattaaaacaaacaccgttatgtcaacaaaaaacaattcaaattcaagcaaatggagacagaggcaactctgataacagggtttatctttactgtctgatttatcccctcttcatcaacaagatttatattttaagtaataaagtagtcttgtctctttggcatctaaatgttttgataagagatgaggagggctggccacagtggtgttttcaggaggcaggtgggtctaggtcagttcaagaccagtttggactacacagtgagttctagaacagctagagaacttcagtgagacgttgtctcaaaaagaaagaaaagctgatgagaggggttcagcagttagaagcacttggtgcttttgcagaggacccaagtttggttcccaatatccttgtcaaccacccatagctccagcttaggcttctatgagcactgaatgtacatggtacacatacatatatacaaacactcacacaaacgctgaacagagcccattagcagtgattatggaattcatctctacatgtggagaacctaagtatttttatttgtttaataatgaaaaatgcacatgtgaacttgactgatacatattcacatataactttcccctcatatccaaacttgacagattggtgaatccagaagaatggccacaatcatcatatgcagcagacctacaaggaagaagaggaggaagaaggaggaggaggaggaggaagaggtggaggaggaggaggaggaagagaaaaaaaatcaatccaaagcaatgatcagataatgttgaaactgaatttctctgaataattcaccttagagcatcagaaaaaaatctagaaaatatatctattaaatacaatcagtacttgagattactatgtttattatccagcagatttaaccatggaaactgagatattttgtgtgtggtatgcatgcacctgcatgtaaaggcctaaggctgatgctcagagtcctcaccaatggctttccactttattaatcaaggtagggcttctcaattgatccctgagctgaccagtggctaatcagccatcttactctggggatcctctgttctccttcagagttttgaaatcacaagtggccagggctatgaggatctgagctctgcccctcatggtgtggcagctgctgtaattacagagctatctcctcaacccaaaagcttaggtttttttttgttttttgggtttttttttttgatggatttttcactttataaagggtaaagcatttctttcaaataattttcagaaataaagcataaacattccatatatttgtgtaatatacatattatacatgttatgtttatgacacatgccccttccccatctctcttttaaattagagcatgtaaaatatgttatttcattaatattaggtttcacctgaattcttcaattggatgctagttatagtgagaatcataatgaaatagttaagcagaaaaaaactccagaattcattgcctttatacttgatttgttctatgaacattaaactcctagaatggctgggtaggtattcagcgcagtgttgagaacaaaacattaatacaatacaggagagttcggctgttacagaatccacacttaagtataagacatggcaaatacacacaaattatgccaatttatcctaagtgctatgaatacaatgtgtaaagtactagtaaagaaggtatgatttaagatgattttggttttactgttgtttttccttctttgtttgggaccaggtctcactgtgcagaccaggttagcctcaggctaattatctccttgctacagtctctgcagtattagaattataggtatgtatgacctcatccagtactaaagttattctacaggccaggagtattggcatactccttgaatctcagcagttaggaggcagaggttggggcaggtggaccctggtctacatagagagctgaatgatatagggtaagacccccatctctctcactttttggagacaaggtctctcacttagccctggctgtcctagaactcactatgtagaccaggctggcctcacagagatctgtctacctctctgcctccctagcgctggcactaaaaaaggcatatgttattatgcccagtggtgagactctgtcacagctacaaacagataaattaacttctataatctatatactctataagcatacttactatattaatatctccaaagtttattccaatccatttcttcttttatactccaaaacatcttcatcatgttgtttgatgagctacaagttaatagttaaaaccagaattgtaatcttcctggcagcttaaagaggaggaaaccaactaaagatccttgtttcataagagaaatagggtaggttaaaacagttactattttactagaaataaaagcctaagacattcaagaatcattagtagagtacattgttaaccacaacctgacattacatttgagaatgatacaatggaaaacatatgatgacagaagaatcataaaacatgacactttttgtgtacctgtgtgtgcaatgtctatatataggtatgcttgcctgtgcatgctcacatatccttctgtgcatgctatattccaatcttagaagtctgacagtgtgaatgatcaacccaatccctcacttctctgtgtgctattagaaatcaaagaacagctacttttttggaaccaccataacttcaacaacgattgatacatgatgacagtcaagggaattaaagacctaatttcaatccttaatgctcttggcaacaattaaacctcccaaaaaattttcaaaaatgaatataaagttggggctgtacagttaagagcatgtactgctctcggaggacccaagtttggttcccaagaccaacaacagccagctcacaagtgtttgtaattccagctccagagaatccgatgggtagggtactcacataaacccacaggaaaattgtagtgcccaaggtcagcccaacttccagccagttaggtttggcattgggcggctcccggacatagaactttgaccgtgttggagctgaaaaaagagagaatatgtatcttactgacttgtagcgaggaaaacttaacatttactagtacttaacatttactagtgtacgtactattgcattaaattctctcatctgagataggggttattgtagcccaggctggtcttgaatacctgccagtctcctggaatcccagtcctggggagggattccaggagagccccaccatccctggcattacattgtcatttatactctatctgcccacccccaatctaaacagtcaaggaaacagtccagagaattgaagtaactcgtctgaggtcaccagcggagccacaggtcggtccttgagattccggacgccttcaaaacctcgtgaaggtgtcgccggccctcacaggctcgggagtgggaggatgagtcgcagcccccggaaggacctccctgttggttgtctcctgggcatatttgaagagccgggggctcttcagaggccaggaggtagtttggaggagggctggcggccgatgttgcggagtggaaaacccacaccgaggcgggttgaaggtcactgcgggactgcctgcgccgcgaccccatcctactacggaggttccaggatggttcctgctgggtgggagtaggccgagggccgagccggcctgaagagacacactcaccgcagctcggaagccgggcgggggccaagagccgcgaaaacgagcgcagagcattgggtagcgccatcttccgcccctagactccgccccttctcggcgtgagcgtcttgtcgggcgggcaccgccttctccctgcgcgcgcatctccggaaggtggcgcggagcgcagtgccccctggcagcagaagcggaatttgcgggtgggccaaagtcctaccttcaggacaaggtttcctagaacctggatttaggggtctgtctgtaaaacagcggatgcaaagaggcctggggccgggcaggcagtttgtccactcctagggcgctcgtcagaggtttaataaagtgtttgttggtgagccagaaaattgaaaatggaagtgtcttgaagaataaaatttgggttgaatttagtgttccaggtacagtaagttaattcattgtgtggtttacagtcatcattttatcgctacattggctacaggatgtgccgtaattattagcatcaattaacagatgggctcaaagcaaacttgtggacaaaggaactttgtatttgcaaaggcctcttaccagttcctaaaatccaattatattcaagatcacttcgatgcctctcaatcctgtgagatagaattctgctatttactagggaggcaatacagggcttcctacatcctaggcaagtgccttaccactgagctacaactccctacatagtttttgagataggggctcactaagttacgcaggtggccatgaatttgatcctcctgcctcagcctcttgaggagctggggttataagacctttccaccaggccctagtaaaattcttgtagatgttacatgaaagtgccctgactggctcaggaggggcatccagatggcaaagggatccagttagctgacctaacaaggtgggactggctataatgccatgtgtctatgtagaacaggatccaaaccatcgtgtctcaagtatcatttgtgtccactatatgtcaacactatgatttttagtcgttaatcttaccacagtttcacaactgtaacataaaacctatcctgtagggtttgttgggaagcttaggagttatctgggagtagtaaatacgtttgcctattcgacacattgtactaatcagctgttttgttttttacctttgtaatttttatgtgtaggctcacattgtgataagtgtgtgtgtgtgtgtgtgtgtgtgtgtgtttggaaggtgacaatgaaggtcagaggcattggatcaacctgactgatcagctgatttaaacatttttatttttatgtctgtgttcgtgcctgtttgtcaagtgcatgatggtgcctgcaactgcccatggaggtcagaagagggcactggatcccccggtactgtagttataggcagctctgagttgtccagtgtgctctgggtgccaggaaacaaacccaggtcatctgtaagagcaacaagcactcttacttgctgagccttctctctagtgcatgatcagctcttttttatgttgcacaattgacagattctgtttcactggtatccaaagaccatgttttaaaaactattggtaatagatgatacattctttttgatttgataagattttattatttttaataatatgttcatatgatggtggggtatatgaatgaagctccccttggagatcagaggagagcattgtattccttgaagccggagttatagatgtctgtgagccaactggtgtgtgctgggaaccaaacccaggtctttgctaggggagtaagctggcttaaccattgagctatctctccagcctgcagaagatacaaacttacccttaaaagccatttgttaaaactaaagctgtttaggtctactttaatagcaaaataagtgttagcattttcctttagttagtattagtattagtgttagtagttttagcaatattattttaaaatctttttagtaaaacaaaaagtcattagcagagtgtggtggctcatgtctaatcccaggtcttgggaagcagaggcaggagtgactctattttgatagaagtttgagtttcatagtaagtcccagaccagcctgggctaatatgagaccctatcttagaaaaaaaaaaaaaaaaaaaaaaaaaaggggggaaaaaaaaaaaaagcaaaaacaagnnnnnnnnnnnnnnnnnnnnnnnnnnnnnnnnnnnnnnnnnnnnnnnnnnnnnnnnnnnnnnnnnnnnnnnnnnnnnnnnnnnnnnnnnnnnnnnnnnnnnnnnnnnnnnnnnnnnnnnnnnnnnnnnnnnnnnnnnnnnnnnnnnnnnnnnnnnnnnnnaaaaaaaaaaaaaaggggggtacagaaagataagccaaaaccagggcacctactgtcaagcctgatgacttgagttcaattgctatgtcccatttaatagaaggagagaatagacttctactaattttcttttgacctccagatgggtgctctgacaagcacacatatatacacacatacacactaaatacatgtattaaaaaaaaaaagaggggaaaagaaagtaaattaccaatagaaggtaaaataatgacattgtgcattgtggctaaacatgttactaacagcctgagttactttagtttgtaacctagtctgagcctcctgggctcatgctcaagtaagcaaaccagcctactaatgcgctgagtcagttgttggctcttgacttactggcttcttgtccactcagcaagagttgtatactctttctacagcacaccgccagagcttgtcctgacacagcttttgctagtcttcaacaagttgaaacagatgctaccttttgtcagagtgtacagaaccagtaagcacattgccagcttcaggatctatgctgggaaagtccattttgttttccagaactctgatccttgtgtccttttcctagtgtatagtttggagagcaatgaagtatgagcacaacgttctcagtatgttagagctcactggacccctagagttggaagaagcagctaaagatgaaactcattttgaaaagaacctagctgggagctaatagctattctagtttggtaggcatctttttaaacatttatttaaaccatatcctgaatttaaatgctaaaatcctgatttgtgacctaggtgaagggagatttaacacctagaaaacaagttttagccctggatttttccatgaggaaacatcttacttgactgatgtgtccaagggagggggtaaagaacaaaacctaaagaaggatggcttcttgtatacataagttttattaaacaaacattaaacaaacatcccaaaatgtggctgttattttgttaagtctgggtggcaggttcctttaatgttgtttttctataaaatgtaagtaaactggcctctggtcttccaaacaaggtaatcttcctgagtgctgggctttactatggttttgaagtccttctgccttagtcgctcagtactgggattccatgtgtgcaccattacacccagctggaggaggaagccttttaagcacagtgatggggaaggatgcaaggtcctcagcagctgcagtgccatacaaccttggctgtaacttcccagaagcacaagaagcactcaaggcccaactccaatttctttttttttcccattcatttataaataaagtcatgcacaattatgatccaattcaatttctatttgccaagtagtagtgattggagtctatagtttatctattactgagttcaggctatcatgtcattgactgtgtggtcagactattatttgtaggcacattttaactcagtaacgaatctgatcaatattgtaatcagaccagtattcactgaaccttaaaaactgctgtttgggcctggagagatggctgagcagctaagagaactcactgctgttccagaggatccaagttggtggcttacaaccactgtaactccagcttcaaggtatgacactttcttctgacttctatgggtaacagtatccacacacttgcacacgaacatgaataaaaataaaaatctttatataaaaacaaacaaaagctccccacccaaaaccctgctgtttagacttggatggggcactatgtctgcaatcctagcatttaaaaagcagaggaggaagtgagatcagggtaagcttgggctacttagcaagaccaacaaacaaacaaaattgctatttagtgggaagaggattgacagcagtagaggcagacaagagatggtaagggggatatgtatatgtgagaataagattgaaatatatcatgtacatatatgaaaataatgaaaaacatcgtgtataattaacatgctaataaaacattacaacttaaaaaattgtatgtacaatttaaaaaaaaaaaacagttggttttctagtgctgtgggtatagctaactcaatggtagaagtgcttgtctggcaggcatgaggcaccaggttagagctccaacagcacacactcgaagaaaagctatttatctatgtctttgtatgtgttgaattttattttatatgtatgagtactttgcctgctgtgtgccctgtgcacagctggtgccttcagaggtgctggggcccaacccaggtcctctgcaagagcaacagggttcttactcaatgagccccatctcgacagccccataacttcatttattatttatatgtgacaatatggagagcagagaataactttgtggggccctttttctttttccatctttatgtgagttcagggttcaaactcgggtgtcaggcttgcatagtaagagcctttacccaccatgccatctcaccaacctaattttcctaaatctttatcgagagattacagtattcaaggagaccctaaggtttgacctctataatcccgatctttcgtttttttcgatacagggtttctctgggtagccctggatgtcttagaattcattctgcagactagggaagttaaagaacaatttgaaaaccacaaagtatgtgtttaaaaaagaaagattgaaaaatgtcaaactcttgcacatctttatgattcatggtgcaaagaatactacaaggcctgcacgagataattgagggtaaaatggctcttatgactcaatggcatgtcactctgtaaaggttttattgtcaagtgttaatgaaatgtctgctggtgggagggatcctcttcactttcaggcctaatcttgctgagtggagtttggcctctaaggtttaaggacttctggtaacaggtggttcaacagttacaatcctaagcatgaattagaagtcaactccaggagttccgaccctcgactctactacatcaaggtgactcacacagctcttacttcaacccattatatgacttcagcaatgaaataaacacatacttcaaccttcaaaggctcctttggcagtacaaacatgccttttcgaatctggctaacgacctttcctggctatcttaaccatagtcaacagaaccacagataccctacccagtcaagtccatttcaaaggtcaagctctttgacgcttttcaaagacgattaagccctcacctcttcggatcggttcacaagtccccacttaggcgaaggttttctcatcttacccttcgcctctgctcaaatataggcacttgggccttgaacgactacatcttcttaaaacacctccgtcggcattttggcatttgaggctcaagctacgattacaacacctgggcgagtctaccccaatgagtgaaaggccggtttagcgaggaggagcaaaaaggctgtttgcgacgaagaggcggcggaagcaccgctggctgccctcccaggagctgagcactggaaggaccggcagagccaacccagaatcagccgttccgcaggccctgccggcctccgcgttcccggcaggctccggtgcagcgagggtggggagagagggtcaccgcgcctgcgcgttgggaggtgtgacccgggtgggaaagccctcgagctccgccattttggctgcctctgtcggtcttttcagttaccacgtgaaccgccgacggagacccgtgaggggggaggtggcggcagcgttaagtgagaaagggggggaaaagaaaaaaaaaaaaagaaagaggagaaaggggtgtcaggacagggcggcgcggcgacacccgaggcctagtggcggcggagcggattcaaggctgaagcgagcttgagaacggcaannnnnnnnnnnnnnnnnnnnnnnnnnnnnnnnnnnnnnnnnnnnnnnnnnnnnnnnnnnnnnnnnnnnnnnnnnnnnnnnnnnnnnnnnnnnnnnnnnnnnnnnnnnnnnnnnnnnnnnnnnnnnnnnnnnnnnnnnnnnnnnnnnnnnnnnnnnnnnnnnnnnnnnnnnnnnnnnnnnnnnnnnnnnnnnnnnnnnnnnnnnnnnnnnnnnnnnnnnnnnnnnnnnnnnnnnnnnnnnnnnnnnnnnnnnnnnnnnnnnnnnnnnnnnnnnnnnnnnnnnnnnnnnnnnnnnnnnnnnnnnnnnnnnnnnnnnnnnnnnnnnnnnnnnnnnnnnnnnnnnnnnnnnnnnnnnnnnnnnnnnnnnnnnnngaacaggtggtgtggctgaggcccgactcattcattgcttgaacgcgcttctccctccacggcccgtccctccctcttcctccctacctgggattcacctgtccccgcccggccggggtcaccgtgactccagagggggcaaggatggaaaagcgaagggagctttgcagtctgcaaactccatgtagtggcttttataatttacacacaagcccccccccggcttttttgaaacccatgtcttagtttgagagcaaacctgccccaccccgccatccttctccggaggtgggactcatttctagggggcggtccggtccggtccggtccggtaggaagttctagtacttaagtactttacttaagactgtgaagttttaaaaacacctatacaaaaacttagccgaaacgatataagaatcttttgagatggatcttgttgacgctagctctgtgtttcagatatttgcagtttgcataagaaacgcatgcagtgatacttacagaggtactggattgaagctgtttacattgtaaactatgcccagtcgtcttggtgctgtcattaatacattgtagcacttttgttgttgtttggtatttagtgtatgagtcgcttcttttacacaaacagttctttaaagaactgtatttgccaattttaagacttgaatggcggtggtgtttcacacctgtaatgccggcactggagaggaagaggcaggtgaatggatctcttgagttcgaggccagcttggtctacagagttatacagagaaaccagggctatacagagaaaaaatgggaagagggagagattcgtgtatgtgtgtgtgtgttagccttttagcttgcagttataattcacttgtttgacaaatatggagatctagggtttgtttgtttgttttttctttctctaaataactcagcagttgagagcacttgggctctcaactgcttgagagccagaggtcttgagtttaattcccagcaacaacatggtgactcataaccatctataatgggatctgatgcccccttttggcgtgcaggcatacatgcaagtagagctctcaaacacataaaatacataaatcctaaataaccatttatgtcgaggtaattgattttacagaaatatccatgttgtagattaatgaatttgtgttgaaaaacgatagtcacatactatttagtggtattttgttttcataccatttgaagtggaattgtagcatagtttccccccctatgttctgagacatctttttccctgtctgtctggaaaaaaaaaattaaaaagacataaaccagatttggcagcaagtgttttcattcactgtgtcgtctcattcactgaagaataacagttgctgttatttctgtgctggaaggctttgtgcattcgaagcaggtgatctaccgcggagttacactcaattattttaggactgatgtgtaggtagaactatagcatagttttcttgcaacatttacccacccaccccctgtccccttatttttctttatctttttttataatgctggaggttggaccttgtgctaaatacaagcagagctatgttcccaaccccctcatcctctgtttatactgatgggggggggaatctctgaaaaaacgagagtatcgaaaaatatttgtcttttaccgatatttaacaaattgccaagattactttttctttccgtacatagaaaaaaagaaaactgtatgcttatgcttcactccttagaaataaagacatggccctgtatagttataataccattaacagtttttttctaaaattcaggcttttcaactgttagtgacaccttttcattgttttttgtttttgtttctgtttttggagactggttctgtgtcactttggagtgtgtcctggaactcgatttgtagaccaggctggtcttgaactgtcagagatccactgcctctgagtgctgggattaaaggtgtaggctaccacgccaggctcagtctttctctatatttcaggcaggcccccatttcttagtattccttttgcttcagccttccagtacttggatagcaggtgtgatccaccattctgggcacaatcaagtgtgtgcctctgtgtaatatgcacatgttggggttgactccagggtgttgcacatactgggcaaatactctacctctgagtagtatatatctcctcccctaaaattactcttattttgagagagttataaagtcaaatgtagtttgagatattctttgtatattttgcttacttttccaaatattatatcttataaatcttatagttgattgtaacattgataatgtctaccaattttattcatatttcccaagttttatttgtagttgtatatgtgttcatttctatacagtagctattacatgtgtaggttctgtgtctgcagtcaaaatatagttctacagtaacacaaaggagcactgttttgcccttttagaactacaaccacctatatccttcccatccttttctctcaccctccagcaactgtgattagtgtttctcctattgaagtaattttaaaggactgtttcctaaagagactcacagagtgtatataacttacagattggcatttctttagtgcagcaggatttccttgtggttcatctaagttttcacttgtattagtagtctgttatattttattgcaaagtaatatgctataatgtagatttagatttagtagagtttgtttaactatttatggaattacagttcttggttgtgatggtgggacaaaaatctttaatgttgttgctaaaatcacggtgcaaaaggattaattattttaaagcaattttttctttttattagaaaattattttacatgtcaatcccaggtccctctccctcccctccgcctccccccacccccaactaacaccctacccatcctataccctttctgctacccaggaagggtgaggccttccatagggggccttcaaagtctgtcatattctttgggatagggcctaggccaacccccttgtgtctagactcaaggagtatccctccatgtgggatgggctcctaaagtccattcctatggtagcagtaagtactgatccattacaagaggccccatagatttccaaggtctccttactgacacctatattcagggggtctggacagtcccatgctggtttcccagctatcagtctggggataaagcaattttattgtgtgtttgtatgaatgtgtgccttcgtgccaacacacacatgtaagggtcagagaacagtttcccagaattggttctcttcctaccatgtgggtcccaggcatgaaattcagatctttaggtggcaagtacttttattcactgaaaggttttgctagccagttaaaagatttatttccataagacttaaacaagaaaaatgtgtaaatctctaaatgaaagaagaaaaagagatacaatgtttttattgttgacagacattaggaatgaaaaaaatgttaccaagcaaaattatagttttgtttcaaaatttcagcttttacagtgttagctcttgcttgatttttttttttttttttttttcctggaactctgacctcaaagttacagagatccacctgcctctgccttctgagtgctgggattgaaggcattcactacaattctggagagctctcttgattttcaagctttctcttcccccactttttcttgtctgataaaggaaaagttgggcatactccagtgctaaaatcaagtgttggtaggttgctgacggtagcactccttttgttgtggtgtgccatacttagtaaacttacatagggccagttcatgcttcacagaattatgaactgtctctggctcagtattttagtgtaaactcatgtaatagtatcactttgcacaatttcataatttctacagtggatttacttgacttagttcagtttgtttgatacctgcaataatatttgttacatatttgcccctccctttctccacagtgctgttttctgactaagcattgttataaattgctaaaaatatgtgcaaaatatttcttgtctctagttcatctagagagaaagaagattaactggtgttctattttatgtgagatttttgcttggttgcttaccagtccttttaaaatttcacatcattttaatatatttagaaaattaaatcatttaaaaaattgtagcctctgcatacctttcctgctgtttgttcatctaaatcagtggttctcaatcatcctaatgcttcaaccctttttgttcatgtgatggtgctccccaaccatattattttccttcataactgtaattttgctgcttttatgaactgtagtgtaaatatctgtattttccgatggtcttatgcaacctccgtgaaagggtcattcaatcctcaaaggggtcatgacccacaggttgagaaatactgatacagaatagtttgagaattgtcctagaattgtccatcattctatttgatttttccaaacagagtttctctgtgtagcctgtcctaaaactcactctctagatcaggctagcctcaaacccagagatctgcctgcctccatctccccaagtgctgggattaagggtgtgagccaccagtgcccagctttattcactttcttgggatctaggtttatggtaggaaagatgtgcttgaaaggtgtggccaaaactcacacctttcaaatttcagcccacttgaaaagtggaaccttcttaatgcctgaaatcaccaagattgttattgctattgcttcatccttgtctcttactctttatatgttaatgtgagtgatacgaaaataaaacccaagttgggaatacttaccactgtttaataagtgttgttttggggctgcagagatggctctccgacctattccagaggacccaggtttaaataccagcacccatatggcagcttacacctgtctgtaacttcagttccagaggatccaacacctccacacagatatacatggagacaaaacaccgatgcacataaaataaaaattaattataaatgttttgagctttagtttgagtgatttgttgttaagttccaaggacagaatatttcttagaaaaaggttaggagccaggcaatggtggcacatgcctttaatcccagcacaggggaaacagaaacagaattctgagttcattgccagcctgagctacaggaatgagttccaagacagccaggactacacaaagaaaccctgtctctaaaaatcaaaagggacaaaaaagagaaaaaaaaaaaaaggaaaaaagaaaggtatttcgggctagagaaatggctcataaccaaaaatataagaaaaaggttaggagaatggtgacaactaggtgatagtctgtgatttattgaacaccttccatttcctaggctgtgctctggacccttcagagtagcctcagatttctgagtactagattgtgggtgtgagccaccatggttttctctacagtgcacttttgagagttctttcctaatctcaaaggcttacaaagcagacttttaatttacatatttatttgtgtattcttgcatctgcatgcccacatacacatgtggaagcgaatgtggtgatcagaggcagtttgtgggagctgggtctctgtttctaccatgtaggctctggggatcaaactcaggtcatcaggcttggcagcaagcacttttacccagtgagttatcctgctggactcagcaggattctccccccccaccccaccccagacaggtttctctgtagctttggagcatatcctggaacttgctctgtagaccaggctggctttgaacatacagattgcctgcctctgcctcccaagtgctgggattaaaggcatgtgccaacaccactcagtttcaggcagatatttttattaagcaaacagaatgaatgaagttaaattagggttcacacgtagagcttggagtcaggaatcagactttattttttcagggtaattaaatcatacttatctaatatttactatttgggggagagatatgagaggagagaataaaaaagaaggaaaagtgtccttataactaatgacaattaggttaattttgttgctgataaaattcatattggaattattaacaagtagatttctatatacacaggaaaggtcacctgccttttttatactatgtctgtccaacttggagatcaaacccttggcacatacatgacaggctcagctatcatttaaatttcagggtgacattattctagttttgcagtagggtctaggcagttactttgaaattggtttcctttttccttttgaaattagttttaatatatttctgcctccctgtactacatgcatgtaaaaccagggctgctaaaatcttttccacttgtgacctccctttgcctgaaaaattgtatacaatttcttaatggagatatataaggtagatgctcatcatactgatcataaacacatttatttatttaaaaaaatgatgttggggctggagagatggcttagtccttaagagcactgactgctgttccaggggatctgacaccttcacccaatgcacataaaataaaatgttaaataaatttaaaaaattgtaatgtctttattagcatatcttagttatacatggtaatgaatttcattaaaataataaagaaattttacatttatttatttttgcatgtttggggtgcatgtcacaatactcatgtggaaccagaggacagcttttaagtgtatgttcttttactttgtgggtcccagggttcctattcaggccttctggcttggtgtggtaagtgcatgtacctggccttaagttgtttttgtttttatgtagcctagaatttgctatgcagaccaaactggccttgaactcacagagatctgcctgtctttgtgctggaattagaggcatgcaccaccaatgccagtcaagaaaattaagacagttctttggtacacattaatcttaccagttattaaagaggaaagcagattgtaaactgtgatggctggttttaattatgaacatgacaactagaattacctgggaaaagagtgtcaatgagaaattgtctagtcccagcacttgggaggctgaagcaggttgatctctgagttcaaggtcagctcccaaataaatacattgaggcttatattaattataaattctgagttgatagctcaggcttattactaactagctctcacaatttagattaacccatttctattaatctatgtgctgccccaaggctcctggcatttgtctctctggaatggcttgcttactccccaccttgctggcaacttctctgactccagttttcttcatcccagcatccttagtttggttgtcctgcctatagttcctgtgtggctactggccaatcagctttttattaacaatgaaagcaatacatgtttacagtatacacagattgttctatagcagccagcctagtctatagagttccaggacagccagagaaaccttttcttgaaaagcaaataagggggctggaaggagggggcttattgagatcaagttagcttgtgggcagcaagtgggagataatgttgattgtgataattgagatgggagtatctgcccaaaatggtggcatcattccctaggcagggttaactccaattgaatgcaagcatgaaaactaatttattgctctgttcctgtttatgagtataaacaacaccatagctctgtgttgcctaggtctgtgtcaacttaacccaatgcagagtcattttggaagagagaatctcagttgagaaaatgcccctataagattgacttgtgggcagtcctgtggtacttttttgattaatgattgctgtgagaggacctggatcacttgggccataccacccatgagcaggtggtcctgagtgctgtgagaaagcggactgagcaagccaaaccagaaggaaaaagccagaaagcagcactcctccttgggctatgcatctgttcctgcctccaggttcttaccctaacttccctgtgtcatgaattgacattattcagggaaaaaagatgaaataaatcctttcctccccaagttgtttattgtcaaggtgtttgatcaagccagtagaaaccctaagatagctcttgctgtgacttccctgcagtaatgtattataacctagaattgtcccaagttgcttttgtcatattacagcagcaggaaatgaagttaagatatacactaatgagatagatgtgcttgtttatttttacatgaagaattaattaagtcttgattgattctcacttgattgattcccacccccactccccagaaagggtttcactgtctaacagcattgtctgccctggaacttgctttgtagaccaggctggccttgaactcagagatctacctgcctctgactcctaagtgctggaataaaagtgtgcaccaccatgcccagctatttttttcgatactaatagacaatactgtgtttttacagaagcagacaaaagctttgtaggaactgaatttacagttacattttgtagatacagcaaagctatacagtccaagatcatttggggtgctcacatagactcatttgataatagaactgccatctcagctattgtgaagcaatgactggagttttccagaggggaacacttggcaccctgcaggattggaggtctggagtgctgctgaccaagtggtctcaactgggtgggttactttctagttcactatcttatttcctttaatatttctgcttttgagaatgtacacacgatagaggattgattcaaatatatatatatatatatatatatatatatatattttttttnnnnnnnnnnnnnnnnnnnnnnnnnnnnnnnnnnnnnnnnnnnnngaatttctcaactccatccttccctccctccctccctctctccctccctcccctccctttcttcaaaacaggctttctctgtgtaacagtccttgttgtcctggaactccctttgtagaccaggctgtccttgaactcactgagatctgccttcctctgcctccctggtgccaggattaaaggtgtgcaccaccaccgcctggcaacttaatttctttcttacttccttcaaggttttctttttctctgatataattatgaccatttgatatatacttagctgtatatttatcacatatcttttgcaattaaagtgtgggctttttttaaaacattttatttatttatacaacattctgcttccatatatatctgcacatcagaagagggcaccagatctcataatggatgtttgtgagccaccatgtggttgctgggaatttaactcactacctttggaagagcagttggtgctcttaacctccgagccatctctccagcccaagtgtgggctttaaaaaaagatttatttaatgtatatgagtagtctaactgcatgtatgcctgcaagacagaagaaggcatcagatccattatagatggttgtgagtcaccatgtagttgttgttgttgttgttgacctctgtaaaagcagcagttctcttaaccattgagccatctctcatccctctaaaatgtgggttttatgatagggactatgtttttgttaattgttatgttcatattggttaatgtatatagtactataatatgccaaataaatgttgcataaaacagatgttaaaatagcaattacagagcaagagaaaaggctctttggattgtgtttgcatgagtattttttggagaagatagttgagctgggctcttggcattgtcgactatattattatacagggtaattgtaagatattgggcagaacctgtgtttggtaagaccttggagattgcatttatgaatgaatcatggtattagttcatttggtggcctattgttataaaagcataataaaaggaaatcttagtcattatttcatttttgcttgttttaacatagagaaagttggtaaagttaaaggagtttattgtcaggtgcctgatgaattagtctctaaagggtaagacagggccatatgtttataaaactctacaagtgatttttacacagctagagtgggggttattatgtaatgttataaccatgaatataaatgttcatgtatgtgttgtcatcatccccccctccaccctcccatagggtttctctgtgtagccctggctgtcccagaactcactctgtagatcagactggcctcaaactcacagagacctgcctgcctctgcctcttgagtgctgggattagtgttgagcaccaccaccaccacatggctcaaaaattgtgatgtttttcatacaatttaaaaatcaaattgaggtttttgggttgatgaccattgtgaagttggtgtaggaaagagtgtaagctgttgatttaacttagtgtttagttgagccagtcttcagatttcacttcctttgcaggcagtatcatgttgatgagagaaaactgattcttaggaatgcttgttctgaaaagaatgtcattttgtagttctgctgtttaaatgtaaaagtgaagaggttttgagagtgacatttttaaatgtgatattaggatgtggaggcaccctaatgtggttgtaatcttgacttttgaggatttccttggactagcagattacagctagtatctaaagtgtgctttgccttttgcatagatttatattaagttgtaacttaaaaagacaaaacagggctggagagatgagatggctcagtggttaagagcactggctgctcttccagaggtcttgagtttgatacccagcaaccacatggtggctcacaaacatccattatgagatctggtgccctcttctgatgtgcagatatatatggaagcagaatgttgtataaataaatttcaaagtcattctaagttatgtagtgagatcctgtctcaaaaacccaaaggttagggatgttattcagtgggagagaatttacttcacatgatttcagtttctagcaccttttcatcctctgtcaaaaaaaaaagaaacaaaacaccaaaccagaagcaaaacctagttaatttgttgtatataggtctttctttccttggtgggtgatggcatccgcttgtaatcccagcactcaggaggcagaggcaggcgaattggatctttatgagttcaaggccatcctggtctacaggttgagttccaggacagccctgggctattcagagacccggtctccaaaaaaagaaaaaattaaattacactgctagcttcttttaagacaatgtttttttaacttttaaaacttctttattattattttttatttaggtaagctctcactatgtagtcctggctgtcctagaactcacaatgtagatcaggctagcctcaaactcaaagaagtctgtctgcctcttgagtgctgtaaataaaagcatgtgacatcatgcccagcctccttttcctactttagagtaaaacaaaagttgtgcagaaataaatgatggagctagtgttttctaaaatttgtttttgattaagaaagatttattttaaatgtatgagtattttgtttgcatatatgtatgggcaccatgtatattcctaatgctcacagaaaccagaagaggcattggattccctagaactgaagctacagatggttgtaagctaccatgtagttgctggcaattgaagaactttggtcttttgtgatcaaagccagtgctcttagctgctgaatttggtttttgagacaatcttctgtagctcatgctggtctggaactcacaatttagcccaggctaacatcagacttgtagcaatcctccagcttcagctttctgagtgctggagttataggtgtttgccattatgcttgactatagctaatcccctcccatattgtctactgtgattatcttttttttttaattttatttattatgtatacaacattctgcttccgtatatatctgcacaccagaagagggaaccagatctcataatggatggttgtgagccaccatgtggttgctgggaattgaacccaggacctctggaagagcagtcggcgctcttctgagccatctctccagcacctactgtgattatcttttgttagtataaaataaacaaaactttagcttaggtaatatggaatgtcatgtttcctgaggaaactataaaggcgcttgagttttttgaggttttatcttgtttggataaaaggaaaaatgaaagcttgcttttttatgaaggcagaacatactctgaagatggatttttctactttcaaatatgttgctgtaccaagtaactaaatagcaatattaatttccttctctatgataatagttctacttaaaatggtactgtttgtttttcagagagattccattggctattacaagatctcctttgattatcaatgtttgagaactgcatcaaagtgaagaatgaaataaactagtatttattgaatatctgtcttgaaccagaatgatagttttgtttttctttttatatgttgatgggtctaaattttgttacattcctttacaaatttgtaagataggtaggtttgttgttgtttttatttttttttccccagacaagatttctctgtgtaatagccctgtcagtcctgaaactcattctgtagatcaggctggccttgaactcacagagatcctcctgcctctgcctgagtgctgggactaaacccatgtgccaccacttcctggtaagataggtagtgcttacaattaaaggtaccttccttattgctttgtatttgttctatctgtatcaggacatacatgttcctaaagacattgtattgtgcaagtttggaataaaaactacagggtatgtggggagaatgggcctggcacagcatcacaaatataagcaaggtagtacttgttaataatctcagcaatccactctggaagccaatttccagactagtctggggtatatagaaagattgtgtctcaaatcaagtccccaataacagcaaaataggactttaataaaaatgataacatggggctgaagagatgatagctcagtggacctgaattcatcatttcaaggaactgcacaataatcatacaannnnnnnnnnnnnnnnnnnnnnnnnnnnnnnnnnnnnnnnnnnnnnnnnnnnnnnnnnnnnnnnnnnnnnnnnnnnnnnnnnnnnnnnnccacccacccaccccaggaaaacaacttgaagctagcttgtttcagaagtgagcatccaaaggactgtagtttgccagttaccatgaagtggtaggttttttgaaatctgatacaaggtagtatcagatgtgggtagatgtggcatagattgactcagagcacacagggtgaactgaggtaactggtagatgtttgatatctttgcagcaatatgctgtgcatgcccacaggacttgtttcagctggctatttttgtattcatttagttttctggctggggaaatcccacagaagcaaacacaaagtttgaagagattaaaacatcctttaatactttaattctagtggagcaaatgtgtatattcaaaataagcattactacagagttgcctattccctgcttaacagcattgtagagaccatacatgatctttgtgtgagctcttctgtccttgcctgtccctcttgtacatagcacctgaggcaccttcatggttttgctattttagttgccagtgtatgggaactctgctctgtagaccaggctctggcctcgaactgttaagagatctgcctgcttttgccttctgagtgctgggatcaaaggcagttgtggtggcctgcaccctcaagccttctttttaagtaaggtccgtccttttctttctgaagctatgtgttgctaaaaacctgtaatttttatcttagcagatgttcagagtcctttgtaactccccagtagccaaagctaacacagttgtgtgtcagaactgctgccaattcttcctctctcataggggacttctctttgagggcaaatttcaggtgctattataggtgtactatgtgtaggaccctgctgtattgttctttggacagttgccattgaagtttctttggtatatatatcaaatatatatatgcacttacctgaaaattcagggttttagttgttttccttatattgtatggtcacctgtggttgtagtgagtctttctgtgtccagcttgcaaataaccatggggagacttctcaaatgatgacagcttggccaatagcttagacatggcatgtttctaactaactcttacaacttaaattaacccacttcttttaatctgcattcttttatgtggcttggtaagctttactttgtgattcccatgctgcttgctcttcgtcctggtgtctttcccccttcttcccagtgttctctctgcccccacatatcctgcctagctattggctgttaaacctgcccaagtgatgtatcttcacagtgtacaaaaaagattattttacaatatgtggttgattgtatttattctttttgggtctgtatagtttttaaaaaagatttaatttctatttgtgtatatgcatggatatatgtatacctgaatgaatttatgtgtgtataggtgatgttacagtcagctgtgagctgcttgatgtaggttctgggacctggagttgtgtccttgacaacagcagtaagctctttttaaatactgagctcttgtgcagcctcaacatggacagttctttttgaggatttatggaatgtttattagaaggtagtaattttcttagacagtattgtatgttttgcctgaaaacagtggtatttcctttaaaataatctttaattgctgggcgttggtggcccacacctttagtcccagcactggggaggcagaggcaggtggatctctgtgagttcaagaccagtctggtctacaagagctagttccaggacagcctccaaagccatagagaaaccctgtctcgaaaacaaaacaaaacaaaacaaaacaaaacaaaaaaaaaacaaaaaaactttaattcaggttctctataactgaattgtttatatttatgtttttgtgtcctctgttcttcaaaattttgcaaaaatttaggaagttttgttacaatcataccctgagttttgtaggtaacactaataatacttagaaatcataaataccacttcagctagctagccctcctgcccactcttcctttttagtttctttcttttctagcttggccttgaactcattttgaagccaaagctggccttaaattcacttttattactcctcagtcttctaagtactcatagtgtttggctctccccctccccccacttccttcctttctttttttttttttttttttttttttttttttttttttttttttttttgagacagagtttctctgtgtagctctggctatcccagaactcaccctgtgtaccaggttggtctgggtctgttactgcctctgctgggattaaaggcatgcaccaccgcacctgtttttgttgttgttgtttttgtttttgttgttgttgtttttgttgttgttttttgattttatgaggttttcgcatcgtgtatcttcataccattcattctcagtccctttgcatctgttctccacccctccccccaatgaaacaatatcaagagaaaaaaatgaagaaaataaaaatgagaaacatgttttgaaaaagggaagaaattaaaaatcttgtcatagaagctgcagtgcaacccaacaagtcaacactgtataaccccttaaccgtacagttttacttgcaagtgttcattgcagagtcattgagtctggttggaggcttctggcttctgttacactatagatgctgggccctcactaggactctctttggatagtttgttgttgctctgtgttgtggagatcctgcagctttgggtctgtgggtcaggttccttcatgtgctcctaataatagatgagatggatgggtaggccaactcataactctgggtctaggcctgagcaactgccagatgggaaatgggacagctatacaattttggggctggctcatctacacttgtgctgaatgtgttggcttaattatattgccctggcaaggtgcacggcctggtcttctgagtgttgcagctggtggggggtggggtggctctcccacactatgaccacaggacacctggcttttttttttttaactactattttttaaacaatttatttttcttaggtgcattggggttttgcatgcatgtatgtatatgtgagggtgtcatattccttggaaatggagttacagacagatgtgagctgccatgtgggtgccaagcctctggaataacagccagggctcttaacctgtgagccatctctctagcccctacttgtttttgtactaaatgtatatgggtgttttgtctgcatatacatctgaacaccaaagagttcatccaatcccatgggtctgggtctaaagttatagacatttgtgagccatcatatgagttgagtgctgagaattgaactcaggacctctggaagagtaaccagtgctcttaactgctgagcctccaacctcctttcccccttcttcctcccatcaccttctctttattccttcttttttcgactctcttttcaaataacataatttaatgccaaaaaagaagagaaaaacctggtgaagtctggcatgttttatgatacatgaatgggactgtagtgctagaaagcccgtggcaactgtcaccttcagttctattaagattgaatctatagtttttttgtttgtttgtttgtttgtttttttgagacagggtttctctgtattgctttggagcctgttctggaactctctctgtagaccaggctggctttgaactctgcctcccaagtgctggaattaaaagcgtgcaccaccattgcccagcatgaatctgtaatttttcacttttttttaaaaaaaagattttattcatttattatgtatataacattctgcttccatttatatctgcacaccagatgagggcaccaggtctcataatggatggttgtgagccacaccttgtggttgctgggaattgaactcaggacttatggaagagcagtcagtgctcttaatctctgagccatctctccagccctagttttttacttttgagctccaaacctacagagacctccccctccccccgcaaaaaaaaaagaccccctaatgccatcattctgcaaaagtattggtgtaaaattcccacagatttttgtatattatcctgggactacatacttgttgctttaaaaatattaagatgtgtagtcatagtggtgcacacctagtcccagggctagggaggcaaagtcagatagatctctgagttgaagccagactggtctgaatatcgagttctaggccagctccatagtgagactgtccaaaaaatattatcttaaggtgcattttgttttatgaaatggtaataacatttttataaactgtacttagaaaaattagaagatgtattctaattcttcagttttcttttgaaacttgacaagcttttaaaacatgggaactttgcgtgggcttcagaaaatgatccagagaattaaggagatttgaagctttcatataaggaacagctaaaacaataaagatgtttggttgaaataagcagggtgggagaggagaagctcttaaagagctagagtcaattatgaagttataaggaggtgtagtttagatcatttcttaaaattattttgctaaatgctggcatcaggcaccagctgtggtcacttccagcagatgagatttaaggtctctttagattaaggtatactgtaaaacacttgacttgttaaatcttactttagcgggtctttcctttttggggggcaaggtttcacaatgtggctgtggctggcctggaactcaaggagatctgctttcctctgtctctttgagtgctgagatatgcaccaccatacttagcctaaatttccccacctccacccccgggacagagtttctctgtgtggatgtcctggaacttgcagaacagactggcatcatattcacagagatctgcctgcctctgcctcccaagtgctaggattaaaggcatgggctaccatgcctgtttttttaagacttatttttgattgtatgtgtaggagtgttttgcctgaatgtatgtaagtgcatgcagtgctggtggaggctataagaggaacttcagatcctcagaaactggggttacgtcgtatgggttatgctaggaactgaacttaaatcttgtgctagaacaggaagtatcttaaccactgagctgtctttccagcccccattgtgggttttgatgccctgttttctttttattttgtttttttttgtttgtttgtttttgttttttttttgagacagggtttctctgtgtggctttggagcctatcctggcactcactctggagaccaggctggcctcgaactcagagatccacctgcctctgcctcccaagtgctgggattaaaggcgtatgccaccaccggccttgatgcccagttttcaaggcaccatactgctgtttagttcagtcatggcataaaagatagtgggtacccgtttgtaagtcattcgatgtctcacatagcttctttttactacctttttataaccaagttgagattttcctgtttttgaatgatacttttcatactgagtcttgttggtgtcctgtggaaaatgttgatgattttgttcagcaggtcagttaggctcaaactgcatgtcctaattctaatgtttgttgttttttggtttttttttttttttttgaaaatccttatgtttctgcttgggtctatccttcatatgcccctcctcacctcatggccatactgttcttccaattgtgcttgcttgcttcctgtcttccctttttttttttttttttttttaatatgttttttaaagacagagtctcactatgtagccctagaacttaactgtgtagacaagactggcctcaaaccatctttgtctcctgagtgctggtactaaaggcatgcaactgctacattctgaaagacccccagaggctcaggcccccaggatctcagtccaggacttccacgaccccaatcactgggtggagttgaaagcttgatgcaaacagcaggaggctttattgcagttgtttaataagctaacccattagctggggcctttcatccatccaccatggcggatggctagaaaagaaggctagaagccactgcatagagatcttatagggcagcagcgtaaggggagtgtctaggggtatgcacaggctcaggattggtgtgcctccagacttgccctgtgttgattggtcaactgattgttatggcccataggctttcccagggctattgctatgctctgtgtgtcattgctgtgcacttgtccgtaaagcacacccagagccttaaagcataacaccaccagctaacttctgattggttccttgccacgaggcaggcatctgacctcctagtgaccaaggcaaggtcaggcaagcacgtgctagcctgttatggctgctgaaatggggagctggtcccttcaattcagctttctgagtttaatttgcttttatttttctaatttcttaaggaataagatgaattaattaaaacttttggtaatagactttttcccctccctgattgcttttataatttttttgagacagggtttctctgtagttctggttgtcctggaactttataggccaagctggcctccaactcagaggtctggattaaaaggatgtgctaccacagccagtgcttttacaattttttgtctttactttccagtggttggattgcaatagaacatttgtttgctttttttggggccggggacagggtttcactggactcatactctgtaaggctaggattataaacatgtgtcactatgcctggtttcagtatttttcactcattttggtctttattttctctagtacatgtgttaaacttgatattgttgttggaattctatttttcattactttgaactatttaagcttccatttagattctgttactgtggcttcaagttttccatagtgtttctacaatcacaatggcttcaacatcactgtgatgtctggtaatattttaagttgttataagtaacttcatttttgttagtttccattttaggatttccatttttctattgacgttttttaagtttcctgactgtgttcaggttttcttcaattcttacatattatagaaatttccttgaaagtctttgctgtttccatcattatttttgagtgtgaaatttgttactcttgtaggctatgggtcactttcctgtgtacttctatttctagtaatactgtcttctcttcataatttaagatacgatggacaggcagttgaatgtgtggatcctgcatttattaatagcattttgttttggcaggcagttctttttgggaagaggggatgtgcattagccttttcatgattgtcttttttcctttgtttttttttttttttttttttttttttttttttttttaaattatccttttccagacagggtttcttggtagtcaggtaggctttgtttgtaggcttgtactgctttgtagttgtgctttccctggcctaagtgtggtgtagacccgcaaagatttctaggaagtttctaaagcttatatctgtcgacttctttgctgcccttcccaagagagtctagctattcagcagtttctcactctatagctgctcagattgtgacacttctgaacacccttaatctgcagtagggaaaatgactttaggcaaaagaggggattgacctcgctcctgtaatcacagtcctgtgctgtgttttgttcaacagctgctaacagatatcttcaaatttttatacaattttttataaaagtatacacttttatacttggcatatgtttaagctgatggcagttatacatttggaggcagctatctcaagagtgttgtatgggtgccagagatgaggctttacttattatctattagaatagttcattctggctctctttcccctgttttctgagaaggcagatcattgtctgtctctgtctttctctttctctcttctctcccttactcccttaccttccaataaactttccacataagttatgtccagaaaaaaatagttaagaatattcttgctttattatgctttggttttgcctgcctgcctgcctgcctgcctgcctgcctgcctccctccctccctccccatagctgtcctggaacttgctttgtagaccaggctgacctcaaatttacagagatctgcttgcctctgtcttttgagtgctgggattattgttgtgtgccgttgctgccaccccttcccactgactctcaggttttaaaaaaataatagcagctgggtggtagtggtgcatgcctttaatcccagcactctggaggcagaggcaggcagatctctgagtttgaggccaacctggtctacagagttaggtctaagacagctaggactgttaaatagagaaaccttgtctcctgaagaagtgcaagaaccgtctcttcaggaagaagagcaggcctcccaggaaggagggattacttggctgcagtacaaagagaacgaaagcagcagtgagagggataacgaacaagaccagccatgagctgatgcagcctgggatgttcatgctggatggaaacaacaacctggaagatgactccagtgtgagcgaagacctagaagtgactggagcctgtttgatggctttgcagatgggttgggagtggcagaagccatctcctatatggatcttacttacatggctctcgaagagcaccttgcccaggtgatggagactactcttgtgcacctggagtctctcgccgttgatgtcgaggtggctaacccacctacaagcaaggagagcattgatgtgcttcctgagatcctgatcaccgaagatcatggtgcagtggaccaggaaatgtgctgtcccatctcctgtggctaatatgtgaagggggaggtggcaactaagctccggtgccaccactatttccataagccatgtgtgtccatctggcttcagaagtccggcacctgcccagtgtgccgcttcatgttccctcccccactctaaaggccaagactctttactcttggcctggttattttccctatctgaaacccacaatactacaggagccctctttcaaaattaacaatggcagtgaaatcagtcggtcaattaaactaaacttgttgattccttgtgattgtttccaatgtgaaatgtacaattacattttaaaatcatcctttctattagaaggtaaaaaggggaaactaaacttactaaatgctacttgagattgcagcaagaacataaattttctaacctgaaagttgaaacaaatcatatttgttctgtagactgtgttgtacttccttgttgatatcaagtttatctgctaaatatgttagaaagacaaaaataacttgtgttgcaagttatgggttaatgttcctgtatttaatggtgtaaaagcttattaaagttcttgttaaagtctcttgcttattagagagagagagagagagagagagagagagagagagagagatttagtctcaacccccccaaaaaaacaattaaaaacttattgtctatttgtatgttttttcagataatttccttttctttttagagtcagagtgtcactacacaatcctagctagcctgaactttctatgtagacagtgctgacctcagactcacagagatcaacttctaccacccacatgtttggggctaaaggcatgtaccaccacactctgtgaattaattatttttatttgggaaggaggattttaaaaatacattttaatataggacctagcatgtgtgtgcacacattcatgcatgtatgctcttagaaaaactggggaagactctctgaggaaattgctcagtagttaaagcacttgttatccaaaaataagattcctagacccgtacaaatactgggtgagaggtgacatcccacctggaattcttgcactccaaaggtggccccaggggatttcccctctccccttttggggggggcatttaagtgtgtggcactggaaaaacagtactttcaatagtagagaatgaaagaaatccattagaaggaagagtgagtgcagagtctattctggagaactcccaggatttctctgctctacaagctgagtgagcagccacagaggcttggagccatggcttaaagcaggctatttctgctgtattttcagtaacatcatttaaagagcagaaagaacagaaacactgtgctggttctgggtgggcagaggtagaattggtgctaggaagatgcttaacctgagcagtgacaagcttacttcatgtcaggaactcagagcaggtatcatggactgtatgtttaagacctggcctataaaattcctcagggtaatggggaacaacttttgagtaacaactacagtggcccaagatgtagaatcctggtctgagctatagacctgggtggaccactcaaagccctgtttactagaggattggaacaaaggcaggcttagtgtatgtgccctgcctaggtgggaaactggaaagagataagattgagttggctccccactgactacacagaatagggtcacttcatgctgctttctgacaagggactgcagaggcacacttctacatccccccaagtccccctctccccagctcagaagcagaatgggctgcctgagtagcacctgtgtggcagaagacctcaggctcaggcaaagaccacatagatggttgtacagctacctcattctcttttccttctttgaaaaaatattctgctgggtggtggtggtgcacacctttagttccaacacttgggaggtagaggcaggcagatctctgagttcaaatcaaggttagcctggtctacagagctagatccagcacaggctatgctccaaaattaaagagaaaccttgtcttgaaaaaccaactctcctccccaatattttcttcctttggtaatttcatgtgttaatagtggctttagtgggctggagaaatggctcagaggttaagagcaccgctcttccagaggtcatgagttcaattcccaattcccagcaaccacatggtggctcacaaccacccgctatgaggtctggtgtcctcttcttgtgtgcagatatacatggaagcagaatgttgtacacataataaataataaaatctctaaaaaaatagtgtatttagatcatatatatctcttcaacccctcccctccatcccatttccacttttcctatgattatcagcctcctctcccccccatttagtgctgctcctgtgcatgagagcatagtctatcataggctccctagtggcatttagctgctgctcctcagctagatgtggagcttggtaaatccctttcctctccatgctgcagtgttgactggtttaattcttgtgccaggcagctttattttaatatctgtcttcagtttaatgggctgactttgtcctgcccaaaatgaagattctcctggaactgggaatgggtctcgctgatgagtgctgagatcatttaaggttgtttagttatacttcctttatcttccctcccctccctctgactagtttaagatttttgttttgctttgtgttgagacaaggtctcacaatgaaacccttggctcaaatggagttcactatatagatcacgctggcttaaactcttaagagatccatctgactctgattttcaagtgctgggattaaaggagtatacctctacacctggcttttttttttcccccagacacagacagggtttctctgtatagctttggaacttgtcctggaactcactctgtagatgaagctgactttgaactcacagagagatgcgcctgcctctgccaccagtgcctggccccacttggcttttatgatttatttttattaatattttttgagggggagagggagaggtgagtgtaggcgcctatggcagctagacgttggatacccttagagctgaatttacaggtgcttatgggccacccagtgtagatgctgggaacctacctcagtttctgtgcaagttcagtatgagatcttaccactgtgtcatctttccagcctttctctttattctttctttaactggagttaccttatttcctcccttctttattattctctgcattttttcatcttaaaaatttcttttaggggctggagagatggcttggtggttaagagaactggctgttcttgcagaggacccaggttcaattcccagcacccacatggcagctcacactgtctgtaactccagttccaaggaatctgacaccttcacacagacatacacatacaggcaaaacactgatgtgcataaatagataaatcttttaaaaaaactaaaaaaaatttctagatataaaaacatacttattttatgtgtgtattttgcctatacatgtatacgtgcaccacaagcatatctggtgcctgtagaggtcagaagagggtgttggatcccctggaactggaattagagatggttgtgagctgtcatgtgggtgttacttggattcaaacctgtatcctctgcaagaacaagtgcttttaaccactgagtcatctttctactcacacttttcttctttctgttccccattttgtttaatttctggtcttctgtttttttctgttgctctaatactaatcttcatctgcacatatcaccaatcttaatctgtatgtgtcctttccatttttacttttagttagtgagtaccttagcatgcattataatgtcctttgtcctttacctcctcccaaattattggagttgaagggatggatttttatgctcactgtattttcatagtagactcttttggttgtgtgtttatgtcagaaaaataatattgtattctcaaaggaatactagagagcaaacctagtgcattgactgtgagctgagggcttagatgtgagctgcacctccagtctagtggggaggaactctgccttactgtaatttagtccctctggaatattgtagatctttctactgaaacaaccatgtgattaagtaaaaatacaacaatttactgtatctcactgcagagacacatgaaacatggannnnnnnnnnnnnnnnnnnnnnnnnnnnnnnnnnnnnnnnnnnnnnnnnnnnnnnnnnnnnnnnnnnnnnnnnnnnnnnnnnnnnnnnnnnnnnnnnnnnnnnnnnnnnnnnnnnnnnnnnnnnnnnnnnnnnnnnnnnnnnnnnnnnnnnnnnnnnnnnnnnnnnnnnnnnnnnnnnnnnnnnnnnnnnnnnnnnnnnnnnnnnnnnnnnnnnnnnnnnnnnnnnnnnnnnnnnnnnnnnnnnnnnnnnnnnnnnnnnnnnnnnnnnnnnnnnnnnnnnnnnnnnnnnnnnnnnnnnnnnnnnnnnnnnnnnnnnnnnnnnnnnnnnnnnnnnnnnnnnnnnnnnnnnnnnnnnnnnnnnnnnnnnnnnnnnnnnnnnnnnnnnnnnnnnnnnnnnnnnnnnnnnnnnnnnnnnnnnnnnnnnnnnnnnnnnnnnnnnnnnnnnnnnnnnnnnnnnnnnnnnnnnnnnnnnnnnnnnnnnnnnnnnnnnnnnnnnnnnnnnnnnnnnnnnnnnnnnnnnnnnnnnnnnnnnnnnnnnnnnnnnnnnnnnnnnnnnnnnnnnnnnnnnnnnnnnnnnnnnnnnnnnnnnnnnnnnnnnnnnnnnnnnnnnnnnnnnnnnnnnnnnnnnnnnnnnnnnnnnnnnnnnnnnnnnnnnnnnnnnnnnnnnnnnnnnnnnnnnnnnnnnnnnnnnnnnnnnnnnnnnnnnnnnnnnnnnnnnnnnnnnnnnnnnnnnnnnnnnnnnnnnnnnnnnnnnnnnnnnnnnnnnnnnnnnnnnnnnnnnnnnnnnnnnnnnnnnnnnnnnnnnnnnnnnnnnnnnnnnnnnnnnnnnnnnnnnnnnnnnnnnnnnnnnnnnnnnnnnnnnnnnnnnnnnnnnnnnnnnnnnnnnnnnnnnnnnnnnnnnnnnnnnnnnnnnnnnnnnnnnnnnnnnnnnnnnnnnnnnnnnnnnnnnnnnnnnnnnnnnnnnnnnnnnnnnnnnnnnnnnnnnnnnnnnnnnnnnnnnnnnnnnnnnnnnnnnnnnnnnnnnnnnnnnnnnnnnnnnnnnnnnnnnnnnnnnnnnnnnnnnnnnnnnnnnnnnnnnnnnnnnnnnnnnnnnnnnnnnnnnnnnnnnnnnnnnnnnnnnnnnnnnnnnnnnnnnnnnnnnnnnnnnnnnnnnnnnnnnnnnnnnnnnnnnnnnnnnnnnnnnnnnnnnnnnnnnnnnnnnnnnnnnnnnnnnnnnnnnnnnnnnnnnnnnnnnnnnnnnnnnnnnnnnnnnnnnnnnnnnnnnnnnnnnnnnnnnnnnnnnnnnnnnnnnnnnnnnnnnnnnnnnnnnnnnnnnnnnnnnnnnnnnnnnnnnnnnnnnnnnnnnnnnnnnnnnnnnnnnnnnnnnnnnnnnnnnnnnnnnnnnnnnnnnnnnnnnnnnnnnnnnnnnnnnntttatagatcaggctggcctcaaactcagaacctcctgagtgattaaggtttgcactactatgcctggtctgtaccttttaaatcatattttcacttttcctatgactcagttactagattttttttttaaatgagcttatgatttttcaaatctaaatctttcactttgtcttgcttttagtttttgtatttaagcctttcaactttgggtgatagagctttgggtgtatgaggcaagtgctgtgccactcgattacatcctagtgcccctttggtgactgtttatttagttggacttagaagaatctgaaaatagcattctgtttaatagcataaaagcttaataatgaacttggaaagtttctgcatttattgataaactgacatactttctttttttgacagagatgttatgaacataaacaatatagaaatggattaaagttctgtaaacaaatcctttccaatcccaaatttgcagagcatggaggtaaggatacactatgcacctttaattagatttgatattattgaatgactggctttccttattttgctctgctattcagctgtctttattttccagagtagacctttagctcttaaaggaagataaaatttaataataaattttgagttaaaataccaagaaaatgatagcacatttgatttaagccttggttacgtcttctaacagagccaatggaaaggcagaagagcccatttaggccaaatgtttttttaattaatgtgtttataagaaaattttgctttaaaacttggaggtggacggattttattctttaccataagcttgttcagaaagtgaccatttactttcttatctatattatatcttaattagctcctcaccactgagtcttaagacatttgtatttacagccagatgtatagcttttgtccaaataatggtgggtgattagatatttgcagaacaggtggtgagtatgtgacagaacttgtaaagaaataaaaggaaaataacattttgtgggtctgatttctatagatttgggaaacatgactcattagtaattaattgacattgtgtattgaggaggggagaatgacagttcactattaagtttttatcattccttctcttcatgtattatgtttccctatgttcaaggttttacttatgctgcagtttggagttgaaagcaatgagagtaaaaatacttaatttgatctcctttcgtattgaaaacctgtcttcagtttttaatctggatagtaggttcttttatattccatttctgaagtatgtgttttggtaacagaacttctaaattaaatatggtagtttcattatcaagaatgaattcataattttagagtagttttctctcttttattctaaaacattttaggaaaaaagaatatcttcttgtattttaacagactgaaattaggttgagtatcaaatataaattccaagctaaatgccacatgcctggttaggttttatcttacattatttgtttaaaaaacaaacaaaaatctatgagaacctacaagaacagcatctagaagtttttgcttacttgacttgttggtttttaaaaacattttaattcattacaaatctggaaatgtttgtactgtttgcttttgagattatagttatttcttattgattactttcttctacattctttttttctttcgtattaaaccagaaaccctggctatgaaaggattaacgttgaactgtctgggaaaaaaggaagaagcttatgaattggttcgcagaggtttgagaaatgacttgaagagtcatgtgtgtatccttttgaaatgtatataagattgagtgggctgttccctcttaccacaaggaagtgctttttttcttaaattgaacaccgcaactgtcatcattcagagaacccccctcccccccatatacccactgcattttaacaatacatgttaagtgaactgtgatctatggaagttcttctcacttggggggggggcattgctatggcttgagtatttatgttcctctaaattcacatgttgaagcctggtcaccagagtgatggtattaggaggtaggtttgtctgaaaagtgattaaggtgtggggatagagccttcaggaataaaatctgtgtaacctgccccttggccacatgaggatacagttatgccatctgtgaaggagagaacaagactcactaggtaatggatctatagaagtagtatgagcagcagatgtcttttgtttgtaaactacccagtttaagtaaagtattttgttatagcagactaaatggcccaagggagataccatgctgatttcactcatctgtgatcataactttagagaaaccatactaaaaggaatattttttaaagatttattcatttattaggtatacagtgttctatctgcatgtatgcctacatactagaagagggcgccagataccattataaatggttgtgagccgctatgtggttgttgggaattgaaaccaggtcctctggcagagcaaccagtgctcttaaccctgagccatctctccagcccctgtcataaggaatattaaagaatcacctactatattgagtaagaacagaggctgtgaagtacaggtttgcatgtaatgaacttcactcagacctgaggccctacttagcctttttctgttatcttaggactcagtttcctcatttgtgaaatggggatattcatactctactggttgtagtgacttaatgttgaaatatataaaaaaaaattatgttttgttaagtgattgataaggactgtatctgagtagaaatgtatgagggaaaacataaaaaaatgtactttggtagttttccgtctctaacaaggatacctgtacctgttttgtgggttagcataatttaagagctgagtcatttaatttagcacattttcaagtgtttaacagtctagtaggacagtacaggtgaagtcaataatgtgttgtagataagtactagatcctatatatgttctcattttgagtatatttaaaacatggcttcttcaaagaagtaccactggttgtgcaaagcagaagttcgtcgattgatcagaggactagaaaggtaagccagggctcaacagtgcagttgtagaaaccctcctactctggatgttgatatgtcagtattttgctctggatttacttaaccacagtagatgtaactagcttaaattaattattttagatttattttatgagtatgagtcttttgcctgcatatatacatttataccatgtgccaacattatcttggtttttatcatttgggttttaaaaaagaagtaggatagaaaaaaaaaagacaaatggggcagtaggattgattgattaatgtgatatagtaaaaagggtttatagtaggtgagatattgcctcctccttttattgtatccctctctccctctcatttctctgtgtagccccagctctcctggaattttgtagaccagactggccctgaactcatagaaatctgcctacctctgcctcctgaatactgggattaaaggcatgtaccatcctcatgcctagctttatagtattcttatcaccaattgtcaatttccttggcttatctatttttagttgactataaggtctctgaatgtaggaaataaaccccaattattgagagcttgtatcaataattttttaaatgtagtgttttggttttatatgtgattgagtgagttttggaaacattgttccatttggaagattttcctaaagaacttttagccaaaggaaagcccctcaggatatcatataaattatatatcatgggtttagttcttctcttttcttttaatgctaaagattatttcttatatttacttggtgtttgttttgtgtcagccagtgagcactttcatgaatgttatttcagttaccattattttgttccgctgtgtaggtatttttatttacgttctgtaatgagaaatgaaataaagctaatttgtttgaggttataacattaataaaggttagatctaattatctatagcttcaaatactgtgttcttttctgttcattaaattctcttttttccttgtattctttcccagtgtccctgtttacattcagaaatttacaaatgttagctttctaagtatttaggagattgtttggtgtgtatgtgtaaaacatttttttttttgttttgagacaaggtttcactttgtatccctggctgacttaaaacttaagtctgtttctctgcttcctgagtgctgagattaaaggcatgtgctaccatacctggctgggaataatatttcttgacatacaggttatatccttaactaagttactttaggttggcatgtttatggccttcttcagaggtcagacaagaaatacgatgaagctattaagtgctatcgaaatgcactgaaatgggataaggacaatcttcagatcttaagggatctttccttactacagattcaaatgcgagatcttgagggttatagggtaagtaaaattcatattgttttattttatcataagagaaaaatcttattacttagaacttttaatatattttggtaaagaaatttttctttgcatttttttgaaaaaaatttaaccgactgcctcccttagtgaatatacctgtgattggagcagttaggtcttaaaaacaatcgttttgttgtgagatagagtaggagtactgtataggttgttactcattttgttaaacattaatactcagaatattgctattaatattttgtaactctagtcttgtcattttctgtaaagtaagtttttaagttttgtgtttgtctattcatattaatatagtttagtagcttctgtttaacccttaaatcagtcttgggtttataatttcctctttaatctatttcttcatgttagttcctgccacagtgttttctttacaggccttaattaagtgcctagaaagtacacatatttggggtgtactttctaaacagtttcatttgctgcatttgctgaaggatatctggtataaagtttaaaaagatactataagattaacactggaggcttcaaattatttgtcacaatacagctatataatactagatgttgaaatttttctaaaatagttaccataattgtgctacagaatgaataattgtggagcaaattaatgtgatcttctgttttcttagggccctgagaattaaatccatggccttgtatgctagtcagtagagaagtatttgctttaactataaacctaacagtaagttttttttttttttttttttttttttttccctgccccttgaaggaaacaagataccagttgcttcagcttcgacctgcacagagagcatcatggattggttatgctattgcttaccatttactagaagactatgaaatggcagcaaaaattttagaagaatttaggaaaacacagcaggtaataacaagccagtttattgtgtctgatttgatgtgtaactgaaagaaagaaatttatgtagtttaaccaacattttatttggaaaatagcttcaaacttattcacaattgaaagagtagtagaaaataactataggaattacctatattatctaatggtaaacctgtggtacatgtacttttaaaagtctttgtggtcaatctgtgcttacattttcttccttaaaagattgcagacatgttcttttacatacttcaccgtactcctaagaatactcctaacaatgcaattgttataattgcagatggtatcacagattatcaaaattagacttgtttctaaggtatagtacatggtgaaaattatcttaattttttcctctaacagttttgttttcaattccattgtctggtttttaagcatacctgtcatgtgatcatttcttgggaatgtgtctgaactaattttaaatagtttatattttctggggctgcagagatgcctctgtggttaacaatactgactactcccacaggagttcaatttccagcacccacacggcagctcacaattgtctataatttaattgtccagttccaggggacccaacacccatggcaaaacaccaatgcacatacataaataaatagtttgtattttctgttattaattatttggtgaacatacattaatgtttttggaatgttcctgactttggatttgtttgcctttcctcattgttaaactgcactcttcacagaaatccacagactaatgatggttgcttctcagttcagcacatcaactggtacataatttatccgttccattttattactgtgttagggtggtatttgcaactgtaaacttgtttctttatgaaaaacctaagaccaaatagctcatctgtcatcacattttgaccaccagccttcagtattcactgcctggctcagctgttaaaatggcaactttgaagtagggattctctcactcccatttttttatttttctagatttttttgtttgcattctgtcattagcagatttccctttctatttgtatatcaaaacttaagcagatttccctttctatttgtatatcagaacttatggattattttattcaatttattataagctgttctttaacatttcataaacagatatttaggaattttaaaagtattgctattaaccacatattatctttttgtttgggggtgtgcagataatttcctaatacaaaaataaaattcttactgataatattccttgtgtctacatgcagacatctcctgataaagtggattatgagtatagtgaactccttttgtatcaaaatcaagttcttcgggaagcaggtctttatagagaagccttggaacatctttgtacctatgaaaagcagatttgtgataaacttgctgtagaagaaaccaaaggtattttaaaaaatatatcattgtaacttacagccaagagtttgctgaaaattcatagttactggtgacagttgcatataatgggaaaaatctatcattcatacattttgaataacttgtgatgtaggaaaatatacattaaatgatgaacattgttgattgaggagaaagggtcgcaaaattcatttgataaaacaactttggtaaagtgtttgttttgaattttttattgtctttaaagggggctgtgctatgtcttcttcactggtctcaaacccctgggctcagtggtctttattctgtagctgggagtaattgatactacagagttaaactaacacccagtgtaagcatctactctgtaaagtctccctgtttttgaagatacaggggtgttggggggaatcactacaggatttggccaaaacataggagataattgtaattttataaaacaagattaactattttagaaataactcaatggaaaaattacagtctttaagtactatatgccagatttttttttttttttttggatttatttatttagtatacagtgttctgcctgcatgccaaaagagggcaccagttaccattatagatggttgtgagccaccatgtggttgctgggaattgaactgaggacctcagaaagagcatccagtgctcttaacctcctctgagtcatctctccagcccctgtatgccagattttattaccagtagtatatatttataaattagtccttactaacattcgtagagcaagctggatgtaatggtccattcctacagtcctatagtgaagggattaaggcagggttaggagtttaaggccagcctggattctagagcaagatcttgtcttaaccccaaacccccaaaagaccaacaacaaacaaataagaaaataacaacagcaaaaacaaactaaacgaattcccagatctctttatggtttatctgagtttatttgagaaaatgggaaggccataaattccagatggcaaggaacaagatttggatttttttgtgataggaatgctaggtccttaaataaatgtctccaaatgctgccgtttattcctaggctgagaaaaagagagttttgtagttcctatttatttgttagttgattgatttgagaccaggttcttttatgttggtataggttagcctttctaggtgttctgttgatgttctggccagacttattaagactggatatctcttgtgtgcatgtaggattggtgctttacagtattcagcgatttgtcctgttagaggaacaagcaaaatgtctttaaatattgtcaaatgtactttggttgagagcccatgaaagtctaatttttataactctctgcaagacccttcacttatatctcccttaaaatactgaatagtagtgactaatttgataattctaagcatgatagggaagctgggaactcaggataacactattcactgtcaaacattaattcaaaaagagactgtgaagagaatttttgagggaaagttttcctgggatgttttaaaaaattactgtgtttttgttaaataggagaacttctgttacagttgtgtcgtttggaagatgctgctgatgtttatagaggattacaagagaggaatcctgaaaattgggcctattacaaaggcttagaaaaagcactgaagccaggtagtgtggtttgatagtcactgttttcgtccttttttctttcttcctcttttgcttcttttaaagacagtgtagccctggttgttctagaacttcttctgtagaccaggctggcctcgaactcagagatctgcctgcctctgcctcccgagtgccgagaataaaggtgtgcaccaccacagcctgattttgttttgtttttttctttcttcatccttaatgtatgtttttaacgtgctgccgcaaaatctagagccagatacatgtttaataggtgaattctacaccagccagcgctacattgtgagactatgtctcaagaaaactaaccatacaaatatgcaaaaataaaccagaattggttcaaagtctagcatgttagattttgttagttcatgcttataatctctgtacttgaaagaatgaagtaggagaatcttgagtttaaagccagcctgagttaaaaagtagtttcaaggcctgattttacatactgatacccagaaatgacaaccaagcaatagattcaaaatctaaatgtataagtttacttcttagtcatataaaagattgagaatattctgaaatccacttttacaagataatagaattgcttaataaaggccagtaagatgacttacttggtggaagaagacacttgactcccaacctgtgacattaaaatgtgtagtggaatgcaagtgcatgtgtgtgcatataccacaccacatcacacacaaattttaagtaaatgtcataaagttaattttttatgtatatgaatgtttgcctgtatgtagagttctgtaattttaaattagttactttgggtaactaatgaatatttaaaatatgaaattatttggaaatactttaaaatgattgttgatatgcttaattggcagggatacacaattttcttgtacaactttgctgtttacttttttgtttgtttgagacagtctcgctgatttcaagcaaatttgcttgaaatttgttatgtagaccatgctggccttaaagtcacagagatccaactgcctctgatacattaattgtaattttattgtagttgtagtgttttacttagattgtaattgtttttatttagtaaacttgttattgggtagaaataagtaatttgtaattatatataaaaagaaatccccccctttttgtctacagctaatatgttagaacggctaaaaatctatgaggaagcctggactaaataccccaggggactggttccaagaaggctgccattaaactttttatctggtaagtagagtaattgcaaaagaaagaaaaagctattgtgatttaagtatgtgtatgaaggctaatgtatgcattgtatgagttgtcaacagaatctttctcttccaggagagaagtttaaggagtgtttggatagattcctaaggatgaatttcagtaagggttgtccacctgtcttcaatactttgaggtctttatacagagataaagagaaggtaaagacaaccacaactattctcagaatctgcctggctggctctccattccctgggctcagcactacctcttttgtgaaccactgttagtctcctggcttgcagtgggaatgtttctatacccttttctcttgtaatctgtttgctctttggtgctgtagtgacatcagtatttgctttctttcatttcctttagctcatactaacatttttttctaacccccttttattgttagaagtcagaagtgatttattttttctttgccttgaaactaaattttagccttgtaatcctccatttttatttagtaaagtgttgtcagaagcattgtttttttcttttttttttctttctgtttttttgagacagagtttctctgtataacagctttgactgtcctggaactcattctgcagaccaggctggcctcgaactcacagagatcttcctgcctcttctgcctcccgagtgctggaattaaaggcatgtgccaccacctcccagccttcaagtgctttttaaaggggtattttaatctttatgttgattatttccttgcaagaacaattttatcaagatatattgggttaaaaacatgaaagatcattgaaaagaattagaaaggtgggagaaattgagcatgtgtaatacataatgtgcatttgtcagtcttttgttgaaaagcccaaggtatgtatgggcttaattgattgctccttttattttccttgcataggtcacatccataagaatctaacctattctagtttttataatttccttcaaatcttttcatagtatccaacttaaataatttttgacttttactaagtttacatgatattggattaaattctgcgttatgatagtctttcagttgttattaaatgcacctaactcaaacagtttgggaatgtcatattgcaccttggtgtaagtgtgtagcctaacttgtgaggagagcacaggtgatatcagaataacctggctgtgacaattccgtgcttatagtccactcacaagaaaacctgcagtaatctgttcattggtcatttaagcaaatttctatagtaacaaatcattaaggatgaattaaataaataaatcatgttttttaaattttgtttttagatttggtgtgggtattgcgctatgttgcccaagctggctagaatttctgggctcatttgatcctcttgcctcagacacttgaataggactacagacacctgccactgtgctctgcttaaattagggaattaatgaaatataaaagtactgcatgcctccgagaaagccagaagtgtagttaaaatttaggagaaagtacaatctggacagacaggtattttcctggacttttagcaccccactttgctggaattcgaagttaatgatctttttcttctgaattatgagacgagttcatttatgagatacttacaaaaatgcccccttcacataacatttaattctttttatttatctgaggccagactttatgtctcaagtttcaggcttgctgcatagttggagctgaccttgatcaaactcttgatccttctgcctccacctcctatgtgctggtattacatgcatgtgccaccatgccagggcatggcatttaattcttgatcataaagagcaagtgataactgttggtattctctatatgttttaagataaaaattaatttagacataagttacagcattgcctctgtccaacattcatccactgctggtttagtgatgttttatttcctatcatacaaatgaaggttttaggagatgagtattaatgtgtgccttttatttttaggttttttttttttttttttttttttttttttttttttttttttttttaagatagggtttctcagtgttttcttggctatcctggaactcgatctgtaggccaggctggtcttaaactcaaagatccacttgactctgcctccctagttctgtgattaaaggtgtgtgcccagcttagactttgtaggttcttgtctagaggttaaaatactcataaagggagggaatatgtgtgggaatatttatttaatcctttagtataaggaatacattttgcataagagcagtaacttactttcactaaaatgtgcttgtgtttgtactctaggtggcaattgtagaagaactagtagttggttatgaaacctctctaaaaagttgtcgcttatttaaccccaatggtaagtacatacatgtttgatagactatgaaattagcatttagttttgattattttgatagcaagtatggtgcatttagtttctttttctattatgtattctttttctattatgtatagccctggctgtcttggaactccatctgtggaccaggctgtcctcaaactcacagagatcccccgcctctgcctctgcctctgtctcaggaatgctagtattaatggcaagggccatcatgcctggctatcctctaatgttaaatcccaagctttacattatttcatgaatttttcaacatgtcttagagaagagtacatttcaaacaaagctgtaacctagtgtaagtggcatgggctcataatcccatctattcagagtatttgaattagggaaatttaagaagttgaaggcctctgggcaagtaagaacctgtgaagatggagtttctttccagcctggtccctttagccctttagccccaaataaacaaacataggcttataataactataaactgtttggccgatggcttaggtttcttattggctagctctctctacctatagctattaatctatgtatttctacatggcattatcttacctgagaatgcccatgcatcctaccttcccagtagctacatggcgtctccggtgactgattctctgcctttcctcttcccagaattctactggtctggtagccccacctatacttcctgtcttcctactgaccaatcagcatttattcatcaaccaataagagaaacatatgttcaaagcatacagaaggacatcccccatcatctcctcttttctgtctatataaaaagaaggtttaatttaaaattttatataacaaaagttatcaagcaagaattatagttactaaaatttagttcattaatatttagcaaaatttaaagaaaatattctatcatctatcctatcctggtgagtctaaagttttatatgtaccttatcttttatcataattcagaaaaaccataacaatctgtcctcaactccatcaaatactacagaaggataatatataaactctagaattgacagagacactgcctggacagccacccaaagttcctctgtaatgttggggcatccatcttcagcccatagtccatagtgtctggcagactttttaatgaggcaggaagcttgaagaaccatgctgtcccttggcaagtctagcagtcacttttctttgtaacctgcttgtccagttttgacagcgtgctgtcaagcagtccaggcaagagcagtcttgtccaatggctattcctgccatgtaaaaggcaaactccataacgagttttcttcaatgcccatcttcctctctgatgtaattggtgttgccaggagctgttatgtctcattttcatgagaaaccttaataaacccattttaaatgccatattctgtaggtctttgaaaaatttgaagtatgcgtatccatctcaaatatattacttttttttttttttaaagatttatttattatctatacagtattctgcctgtgtgcaggcctggttgtgagtcaccatgtggttgctgggaattgaactcaggacctttggaagaacaagcagtgctcttaactactgagccatctctccagccctaaacattacatttttaaatgagctgtataaatacaatgtctaaacaagagtagaaatacatatataacaaaattgaccttaaatttgtatcaataaaccaaaatccataccaatgcagagtattcatttctatatcaaccttgtttcaaaattttgaaagagggttgctggtacagctcagtggtagagtttttgcttggtgtgtcttaccaggccatggggttcaatctcaagtatttcattttccccccaaacacacaccatacatatacaccccatacacacataacctaggatgatattatgtttgcaaatcagtactttcatggatacagagttagctcagtctgtaaaatatacgtgtaagggtccccaagtttgatttcagtgctcacatgaaaaaaaaaaagaaagaaagaaaaagcaaggcctcgttgcatgtgtttatattcccagtttgggggaggatctgctagatagccagcctaacctaatttgcaagcctcgggtcccagtgagggaccctatcctaaaaaccaggtacattgcaactgagaaatacttgttcactgtatcaccaacatgtagatgtacatgcacacaaaataaatatgtctttagttattaataaccagtttacaatcacattttcagttgtattatattttgtctttccctccgttctaattcagtccctttgtctttcctctcctttccttcttttttctctttccctttttctttcttccagattttgagacagggtcttactttataatccaagatgttcttgaacccaggacagttgtcttagttgggatttctgttaccgtgataaacaccatgaccaaaaataacctgaggagaggttttgttgcagtttacaactcagggactgagagaagtcaggaaggagtagggtaacaaacattttgaagtcaggaactgaagtagaggtcatagaggagtgctgcttactggcccatggcccgcttcctaaggcttagcctgatctcttatacaccactgacagtgggctggaccctcccagatcaatcactaatttaaaagccatagtgcagactgcccacaggccagtctggttcgagggagtattttctcacttgaggctttttcttcccaaatcagtttgtgtcaagttgacataaaactatccagctcagcaatactccttctttaccacacccagccctttcctttatttgaagatcaagtaactcttaacagaaataatttggttgttgtctcctttaattcatgtttatcacctcttgaacctgtgattattggagagtgaattttcttaatctagattttgatgaatatattttacgtatattatttttctgcccttataaaatattttttttaattggtagttagatgaagaaatggatagtcttttctgcttagcattagccacatagaaaaaagtctggttgcataattctcaatcttcataatgctgtgaccttttaattcagttcctcatgttgtggtggccccaatcaatccataaaattattttgttgctaactataattttctactgttatgaattataatgtaaatatcttctttcataatggtcttaggcaaccctttaaagggtcatctaacccactaatgtttggggttgtttcccatagcttgagaaccactgatctatctagttctttatagtacagttcaaatgctggttagcagcaacatacatacagctaatgtctgttctactgaacaggacaggtgagaaacatgtctgttgctccagaaccttgtaacggacagactctagctaatggtttgatgaaggttgattaattgggttctctctgtgtctctgtcttacctctctgtctctgtctctgtctctctttctctcttctttctctaataaaaacataaactaaatgagccaaaatcattttcttctatgagtaggcaaatactgttattttgaaagctaaattttatttcacttacaatttggtttacaaaagtttcagcttgtatggagaaagacacaaaaatttttttcctcctatgttatactttggttctttaccaagtttcacgagattagactggttcattgcattctccatcgtggcaagtagttttattgaaaaaaaaaaaatgaattcagggcctggtgatttctgagtttagtccctggatcccccatggtaaaagaattgaacttacttgaatgataagttgtcctttgacctgtttatgccctgtggcaggcatgcacccagacacatatactcacaacaaatataacaaatgttttcaaagaaaataatttctatttgggctggagagatggctcagcggttaagagcactgactgctcttccaaatgtcctgagttcaattcccagcacccacagggtggctcacaaccatccgttatgagacctggtgccctcttctggtgtgcagatatatatcgaagcagaatgtcatatatataataaataaataaaatcttaaaaaaagaaaataatttatatttaagcattcctgatatttatttaattttatgtggctccatctttcaagtactgtggtggtaggtgataacttactcaatgacaataactcgagcacctaacttgtgcactaccactgaagatctggaatcatttttcccacagagttctggcttccgtagtggactagcccaccatgtgggacctggggtacacattgctactaagctggccattgtttctaggtctcagattaattttaacagtacttttaaaaaggcatagagtggtttcattggttaattgtcatgatattcctttgattatcagcatttttctacatattttacaatgtggaagaggctcagtgacatacccatgaatatgcagcacttttgttacagatctatcagatgaggagttggtgagttccactcctattatttgtccactgagccatcctgttcttactagggaaaagataagcaaatagaatttgagagcaaatatgattctcaggttatagagatttatgtttaaggacaaaatttttgttgtgtgaattttgtgtttaactttcacattattaaaattacatcttgaaaacgttacatcttgaactgaaatatagaataaatgttttttttatttttcttattttctttagatatagctcttattcagtctatattgttgatctttacatgtttggcataatattaagacctaaaaatgtcaccaaagataaaaatgttcacatcacaaatatatatgtgggttagtatattacttagaaaattaggcagtcacacttttcttaaaatcttactataagtaaggtatgctaaggtgcacttaagatacagaatagaaaatgtgcttagctgtagattacatctagacacatgcataaactactttaaaactactttccttataaatagaggggccattatggtggttggatattctcttaatgtttgtaatgtctaatcttgattttttttttctttttttccctttcaagatgatggaaaggaggagccacccaccacattactttgggtccagtactatttggcgcaacattatgataagattggtcagccatctattgctctggaatacataaatactgctattgaaagtacaccaacattgatagaactctttcttgtaaaagctaaaatctataaggtaaaatctttatcccttctttttttgtaacgagatattagtcatcatttttgttgttttacagcttctaggtagagtaagtaacattgtatgagaaatatcaggctgatgtattcttagagttgtaatggtaatgtttatttgttcatttatcaataactatacaaacaatacataagagaaatactgtgtgtggggggactcatatgttcctacttgaattgttactgaatgtttaatagttatttactgtaaattgtgtgtttctgctaacagttaagtatgatcacatggagagatactctctcagcctagacacacatgggagggcctaggccctgccccaaatgatgtgacagactttgatgattccccccatagaaggcctcactctgtggggagtgaatgggggcaggggaggatgggagggagatggaactgagattgatacgtaaaataaggttgtttctaatttaagtttaaaaaaattaaaaaaagaagaagtatgatcagtgtaagtatctgatgctatttaagtgaaactagtttattttgaatgtacatgctaccatctcttgactcagtttctgagctatgcatgagaagctcctgttacatgttctcaagtcataaagtttcctcttctctatcttatttgccagtagatccagtaataggatttttttaaaggagttaatgtaatatatttagaaagaaatataaacatataagaatataatggaattaaataatatttccaagtaccccccctttttttttttgcttgtactgggttttgaatgtagagctttatatgcactatatagacattaacaccaagttgcccccatctgcaagttttgtttatttattactgtattttatttgaggcatggtcttggtagtaggctgagcttgaaagtgggacttctcctgattcatcctcttaagtgctggtattaccagtgtgaaccactgtggcccagaactttaaaaacatgtctaaaattagattgattattttaatggaggcagcatgtttttgttgttgttttgttttttagacagggtttctctgtggctttggtggctctcctggaactagctcttatagaccaggctggtctcgaactcacagagatctgcctgcctctgcctcctgagttctgggattaaaggtgtgcaccactaccgcctggctacagcatgtgttcttaactgtagcatgtacatgtaagttggaggacaacttaagagagttttctttctaccttttggttagaaacatctgaacaggtcatcaggcttggcagcagtttctctttaactgctgagtgagccatcttgtttgctaccccaaatgttttaaagccaagttttactgcttttccagatgtcctagcgaaatgaattataattaggatagtgggggaatgtccattaatagctgtctgacctggtggttgactgttctgcaaggctaacttgatgatgggttccaggaatattcctgtcttaacctctcccagtaataggatgaaagactcaagctactacaactggctttcttacatgggtgctgggacctaaccccaggtcttgagttaaaagagtatcttttctttcatttgtttaattatttataggtcataaattacttaacacaataaaatgatcaaaattgttgattttctttttctaccttcaagcatgctgggaatattaaagaagctgccagatggatggatgaagctcaggccctggacacagcagacagatttattaattccaagtgtgcaaaatacatgttaaaagccaatctgattaaagaggctgaagaaatgtgctccaagtttacaagggtttgtatggctaatgttctggagtgtaaataggacatagttgacttcgtgttcatacctttctctttcaaagttagttcttttatgtgtgtagatgttttaccttcatgtgtacggtctgtgaaccctgtgcatgcctggtgcccaccaaggccagacttgggcattgtctttgctttaactgaagttaagacagtcgtgagcagccatgtcagtgctgacaattggacctgaatcttctggaagagcaccctgttcttttaaccagcaagtcatttttccagccccttaagtttcttgtcagtatcacagttgtccagatattaaattattgtattagacaaagaatagtcaacattagataaaatattttctttttatattatcttatatttgttggacttttttttttttttttttttttttgagacagggtttctctgtgtagccttggctgtcttggagcttactctgtagaccaggccatctttgaactcagagatccgcctgcctctgtcttctgaatgctgggattaaagatgtgtacctcacagctgtagtcatcttaactcagacagtcatggtagttttttgttttttgtttttcttaaagattttatttatttattatgtatacaatcttgtgcctgcatgccagcagagggcaccagatctcattcaaggtggttgtgagccactatgtggtgctgggaattgaactctggacctctggaagagcagtcagtgctcttaaccgctgagctatctttccagcccctggacaatggtttttaaaattaatttgtagctggcaatgatggcacatgccctttagtcccagcactcttaggaggcagcggcaggcagatctctttgttcaaagccagtcactctatacagagtaagttgcaggacagccaaggttacagagaagccctgtctcaaaaaaacaaataatcaaaacaaagaccccccccccccaaaaaaaaaaaaaaaaaaaaaaaaaaaacccccccccccaaaaaaaaaaaaaaaaccaaaacaaaactggcttgtagtgattactgtcgagaaaaatgttttaggagttaagggaactagtatttattacttatctgccatatgctattatttattgtgttattccctgccacccagttattgtagatcttttgtggagtcacttgcaaaattattatccctagtggttagaaaaagaacttaagtcaggtggtggtggcacatacttttattcttggtacaggatgtagaggcaggcagatttctgaattggaggccagcctggtctacagagctccaggatagccaagaaagaccctgtctcaaaaattatttcagaaatgtcatcaattgactattgttcctttttaaatcttatgataccgtgatgtatttggtggggattgtctggaatcactatgtgatttttcatttaggaaggaacatcagcagtagagaacctgaatgaaatgcagtgcatgtggttccagacggagtgtgcccaggcatacaaagcaatgaacaaatttggtgaagcacttaagaaatgtcatgaaattgagagagtaagtatctaacatatgtgaacttctaattttgtttgatcagatattgaagcctttgtgaaagccatcatatctcccccactctcccctccacatttgtaattcacagcatatattttagaatagtaataccatattcagattttgtaaatgaaaacatctggtatgatcttttattcctttaagaatccttttcaaagacttcaggaaacctttgtgtcctgatgatgtttttactgcatgcagttctaacttttgaattgctgctgtctatccttgataaagatttgagcttggaagcttttttgctatctttctatatgcagtgcagttaataattttcttacaaaataatttttcagcctgggtatgctaatgtgtacttgtaattccaacatttgggatcttgggagatagaggcaggaagttctggagttcaaggcctatcaccactgtgtgtttgagggcagcttgggctatgtaagaccctgtctgaggctggagagatgactcagtgattaagaacactacttggtcttaagtggtcctgatttcaattcccagcaaccacatgatggctcagaatcatctgtaataggtctggtgccctcttctagcctgcaaggatacatgtaggcagaacactgtatacataataagtaaatcttaaaaacaaaaaaaggaccctgtctgtacaccaccaccttccagatgaaaatcattttttttttttttttttggtagtcttcacgatagatttctatgactagtgttggggtgtgtgttgttttatatataaacataggttctgttaataagttgacatttgtaatatcaaatgtagaatatctttcttggttgaactatgaggttgctgatttcttgacttattggctacttaatttttcatttacataaaagtgcatcctacatagagttcagatttagagcctcaaaaaaatttctgtagtatatgtgccaactgtatagtagcattgtcatatataccagttagtgggtagtttgtcagaatagttttacttaaatatgacttaagaaggaaatatgtatgaagtgttattatcccctttaacttatttcagttttattttcattggtgtcctgcatttatgtctgtgtgagtgtgttggatcctccgaaagtgggtacacagacagttgtgagctgccatgtgagttctgggaactgaacctggatcctctgcaagagcagccagttctcttaaacattgagctatctttccagcccctgccaactatattttttatttcatattccaaatatatcaaattattataattttatatttttatttttcatgctaatgaagcaagtaatcccaaggttttgcttttatagttttcttggacaatgttgtactccagtgtgataataaaaagataattttttttttttagcattttatagaaatcaccgatgaccagtttgattttcatacatactgtatgaggaagatcacccttagatcatatgtggacttattaaaactagaagatgtacttcggcagcatccattttacttcaaagcagctagaattgctattgagatctatttgaagcttcatgacaaccctcttacagatgagaataaagaacacgaggctgatacaggtataacattcagagatttatcattatttgctctttgtgtgtgtgtgtgtgttttaaggattttatttattatgtatacagtgttctgcctgcatgtcagcagagggcaccagatctccttcaaggtggttgtgagccactatgtggttgctgggcattgaactcaggacctctggaagaacagtcagttctcttaaccactgagccatctctccaacacccacgctgtttgtgtttataggtacttaagttaatgaataatgtagctcccttgcccccagagatttttattgagtatcttggtgggggcttgttgtccacgactagaaaatgatgggtgttttgtgaatttgtctaagtaatagaaggaaaacaccacttttatgcttccaaaataagttaagacttaatttgatgtttgattttgtttttgttttgagaagttttttttggatatttggtgggtgtctaaggatccaatgacaccacagctcattttaaaaataagtggttaaaagaagactaggaaaactgctgggactcatttttcactttaccattttttagtgaggtatcaagatttctagggagaagtgatcccttaacacttattagagaaagaatctcaaagtaaaggtggtctttcatatatggtatatatttattatatgtataaatatttttaagttatgactttactgtagtgaactgacatgagtccctttaagataatggcagatatatatgaccacagtctcttcacaggtatgaagagacaccataaccaagctcttataaaggaaaacatttaattgtggttgccttcgtagttcaggtatttagtccattgtcattgaggtaggaacccatggtgttggagaaggagctgagagttctacatctggttctccaggcatcagaaagagacagtgagccattaggcctactttgagcttctgagatctcaaagcccatccccagtgacacaattcctccagtaaggccacacttcgtaataatgccactctccatgggcctgatggggccattttcactcagaccaccacatatagtaagactctgttagaagagctaaaaattggaaaagtaactcagttggttcttttctagcacgtgtaaggccttgcagtatagttcaaaaaacacaatccatttgataaaatgttattagagcataatgaaacatatctttttttttaaaagattttatttatttattatgtatgcagtcttctgcctgcatgccagcaaagggcaccagatctcattcagagtggttgtgagccaccatgtggttgctgggattaaaggtgtgtgccaccactgcctggctacagtgttgtttaatatgtaaacaatgttactatatacaaaataaagttagtttagaataaataaaaaattaaaagcagggagtggttaagatcatatcctgctcttggagaggacccaaatttggctcgcagcactcatgttgggtggctcacaattgcccatatctctggctccaggatgtctgacattgtcttttggcctttgtaggttttgcattcacatgcctctcaccctttaaatatttagttaaataactaaagcctttgggggtaaaaattagagtctggtgcgatagctcagcagttaagagcacttgctactccagcaaatcatctaagattagttcctttgcacactcctgttttaggggctacagtactctcttctgacctctgagggcacctgttatacatgtggtacacataacataaatacagacaatgcatcttatcttagtcattgttttattgctgtgaagagacacaatgatcaagattactattataaaagaaacatttaagtgagctttcttgcaatttcagtctattatcatcatggtagggagtgtggcaggcatgatagtaaaatagtaaaatatatcctgcttttttaggcaccagacaaagagaggctggtcctggcattggcttttgaaacctcaaaggctcacccccagtgatacacttccttcaataagccttatctcctactctttctcaaatgtgccactctgatgactaagcattcagatataggtgcctgtgggtgccattcttattcaaaccatcacacacctataccaataaaattttgaatgttgccaggcggtggtggcatacacctttgatcccagcactcgggaggcagagacaggcggatctctgtccgttcgagaccagcctggtctacaagatctagttccaagacaacctccaaagccacagagaaaccgtgtctcaaaaaccaaaaaaaaaaaaagagaaagtttctcaggtagttacagtgagttttgttaatatgtttataattctgtaacacttacttcctacagcaaacatgtctgacaaagagttaaagaaactacgtaataaacaaagaagagcacaaaagaaagcccagatagaagaagagaaaaaaaatgcagagaaagaaaagcagcagagaaatcagaaaaagaaaaaggatgatgatgatgaggaaatcggaggccccaaagaagaacttatcccagagaaattggccaaggtatttcatagttgtgcctagcacaagtgtgtgagtgccacggcaaacttttggctttgaaaattccaattatctttatgtatttgtttgtgtgtcttttgtgcagatgtgtatgtatgtgtgtggctgtgcttgtagagattagaggacaacttgtggaagtctagctcacctaggctacctaaccaagaccctgtctgaaaaaaaaaatttattttttaaaaaatcagactctggctgggcggtggttgatactcgaggcagaggcaggcagatctcttgtgagttccaggccagcctggtgtacagagcaagttacagaatggctccaaaccttcagagaaaccctgtctaggaaagaaaaaaaaaaaaaaaaaaaaaaaaaaaaaaaccagactctgatttgtggattttaatcattgtacccaaacctaaatacttaataattattatcacatgagttattttgattaataacctttcttttgaccacagcaattgtattttatgggggtaatggttgtgtaactcatgtgttaaatggatagaataaatgcattttagcgtcactaatcatttgaaatttgaatttcaattcctcctttagaaagttttcctgagtctgagctgcagtgttgtttttgtgccaggtgtcacaatatggcctaatgattattagtagctagggttatagattttcagaactaagtttctgagtgcattgtttgagaacatagaaggaacccctctcatagattgtttctgacttcatagtattattacttgcaaggaacataagggctcctcttttcctagtataagtagctcaaagatgctcttatccagtagcattctcacttatttggtagtgtcaaggctagattacatcaagccttccataattagtagttgcaacttgaaggatattctaaaagtcaatgccaaatagcctaaagtgctgtgtgtgtgtgtgtgtgtgtgtgtgtgaatcatctcaagatagcatatgtatgacatagaacaataccattaaatcagtaattccgtccatggagaaatggaaaatgctgtgggtttagttaataagtttggtactcagtcagctaaagataaacctaaaattttcatgaaagcttgtttgtttgttttgagcaggggctcatcctagcccaggctattctcaaccttgtggcagttctccttcctcaagtgctaagattacaggcaagagccaccatgcccagcatatgatcttcaaattacaaattgccttgaaatctaatcttcatgagacagagacatactgttttattttatatgtatgtgtatttttcttgtgtgtatgtctgtgcaccacggagtgcctggtgctggcagaggtaagaagatagtgttgaatcccctagaaatggagttagcacatggttgtaagtctttatttgagtgctagaaaccaaacctgggtcttctccaagaatagcagttgctctgaactactgagccatctctccagcacctagttgatttgtttaaaattgttcttctagaagattagcatccattttgtggcttacagaagtctgaactccactcccaggatatctcacactcttctggcctctcagggcactgcatgcatatcatgtacaggcacacatgcaacaacaccaatatacctaaaaataataagagtttttaaaaatcatttaagaattctagagaaaaaagttgtcttatgaaaggttaaaatttgacagtgtgtttctgggtaactggtaagtgcttttttttttttttaacttttggcaaaagaaaacaggagtttaaattaagttcatattcctcaagaatcttacttccttttgtataatgtcttttattttgttaggttgagactccattggaagaagctattaagtttttaacaccgttgaagaatttggtgaagaacaagatagaaactcatctttttgcctttgagatttactttaggaaaggtaggatattaggttacagtggccctgataaaactgatcactccattttttaggattagtgtcacccaccactgttgcatttcttggcagaggccaatatagatttcttgtagaaatgcatgctatgcacagaatgttgtgggagaatacagtgatactatttgacttcttcgagaacacaaagcccaacagtagctgcatacctgggattaagtcagaggtagtaatcacgtcatgtgtgattcaaggaacaaatttaggattttgtggataaaaattcttaatataaatgtaaagcttagccaggcagtagtgacacatacctttaatcccagccttttgtaggcagaggccagcttgttctacagagtgagttccagatcagccaaggctgcacagagaaaccctgtctcagaaaaagaaaagaaaagaaaatgtaaaaaatagtgggttctacagttaagcatcaaataacttttatctgttatgagctgataacataaataaaaagtagtttctgagctggatctttagtcttcatgattgtgaaagcgagtgtccactaaaaatagaaaatgtcagcagtgttggtgttggcgatattggaagggccagaagaatggtcttgtctttcacttttagaatgctcttgtgtacacatgtacatacatatgtacgtacatacacacatacacacagtttcataataatgaatttgtgtaattcattggaaaagtttattatggtagtatgaattgaaataaaaggaaattggttattagtaagatcagactaaggctgttacatcaataagtagtttttgtgaagctagtcccagctactgggaagttgaggcaggagtgttgtggcccatgagttcaaggcccacatggacaatacagatagactgtaatgtaacttttattttgaaataggatgcaaaacttagtattaattgaatgtttaattgtttatgaagacaagtccctgtgttttcctgactgggctggaactcagtgtgtagaccaggctagacttgaacttgtcagcagttctcctgcctttgcttcctgagtctgggatcatgggtgtgtgtcagtatgcccagctgttaacatatttgtatagatatataatacagaagtggctaggaagaaatggatcaatagattgcagttgtttcttgatacatttttaagatgttaaaatttatcttaactatattttctatttttcacaattaaaactttgaaaataagtttattaaataggtaatttttatattttaaacacttaaccctccttttggggaggggcagggagataggatttcactatgagcaatggctggcctaaaactcatagaggtcctacttgcttttgcctcctgagtgctggatttaaaggggtgcaccatggtgcctgactaacccagttatttttaaaattaatcttagagggccagcaagatggttcatcagatacccccaagcaagacattttgagtttcaatctcagaaaccatttggaagaaggagaaaacttactagtataattcagtgacctccactagcacacacaaaatcaatacaattcttagcacagtagtacagtgtagcaactgttcctgtaatctcagcaggaggcgaatgagttctaggccagccaaaacatagtgagaacctcgtcttaaatgtaaattaaaaacaaaagtgtttctaggtggaatcctcagatacactaaagttttgctgcttaaagggataatggagggctctgttgaattggcttcttggctgtgttctaatttcaaaggtgcctcagcatctttcattgatttctaatagatgatgattaaagagcatggcaggaattttaatgttttctgagttttggggccatgggaaaggaattatttcagaataacttagggttttctactttgatatttgaaacatgatgccaaattaggaaagtctcaacaaagaggtgactatcaagaagactcagtgtaagtttctgtttaacaggtggaggcaccgctgagacttgggaaaggtaagcaggtgggaatagggatagtgtagagcaattagaaaatatagtctgggtagatggcatccagagatggcagaggagtcagagatggacagagtcaggtggaaagggaattgtgtgtcattgaatacagaaaaggagagtttttctatggaatgtaacatgtctttgtttttattaaaggaaactggaaacaaattggttttaaattttgtttctctgtttatatgatactagttcatatatcacagaatgccgtgtaagttattttttgtggaaccacttgaagaatggcatatgaacataactgacatgtagccaattggaaggaaaatgtttgcttcaaagatgttatagctccaatatgattgagtctaaattcactttttgtgtttctaaggtccctggcccttccaggaaggataacttattttatcaaattatcaaaatagtatttttttctctttatagaaaagtttcttttgatgctacaatcagtaaagcgggcatttgctattgattctagtcatccctggcttcatgaatgcatgattcgactctttaattctggtaggtttttattcccatacttcacatatttgattagtagctcatattgaatgtcagactggagtgtggctcattgggtcagagattttgctgctcctccagaggacttgagtttgatttacaggacccacattagacaaatacctctaactccagctctgggctaaccaatgccatttttaggccccaagcaacatctaaaaacacatggcatacacgtacataagtaaaagcaaataataaatattaaaaaattaaaaaaaaaaaagtatgggggctggagagatggctcagaggttaagagcactggctgctcttccagaggtcctaagttcagtgcccaccaactatatggtggctcatgaacatctataatgagttctggtgccctcttctggcatgcagacagaacactgtatacatactaaataagtctttgtgtgtgtgtttgtttttctgagacagggttcctctgtgtagctttggagcctgtcctggagctcacactgtagaccaggctggcctcgaactcacagagatctgcttgcctctgcctccctagtgccgggactaaaggcaagtgccagcactgcccggcctaaataaatctttaaaaaaataaaaagaatctgaactaaactcagtcattttaaaggaattgcatattcagttagctaagagaaaaatattgttcttttgtgatgaagatttaattttaaagtccataaatgctatgtagtgttggtatacaattgtgtggttcatgtatttgagaatcttttggctctctttctctgtttctgtaatggagattgaacctagacctcatgcttggtaggcaaaacatgcttctgctaagttacaacctatctataagtaaattttgttactttaaaatagtcacctaaaagctgggcattggtggcgcacgcctttaatccccagcactcgggagacagaggcaggcagatctctgtgagttcgaggccagcctggtctccagagtgagtgccaggataggctccaaagctacacagagaaaccctgtctcgaaaaaccaaaaaaaaaaaaagtcatctaaaagcaatcatgtgcttttcagttattttgacaatcagatcaatacattgatttcaatttgtattagaagcttaaaataaacactgttttcaagccctttccctccatctgggatagaaatgttagtgttactgatgtgcctgactgtatttggctttttaacccaaggttcaggaattgagctcaggtccacaggcttgtttggcaagtgcttttacctactaagccatctccctggacttcttttgcccttttttactttatttatttatttgttgaggcaagttctttgcacgttgtcacgactgtcctagaactcagtgaatagaccaggctgactttacactcacctgcttctgcttactgagtgctgggattaaagacatgaaggaaaatctacttactgttttcaaaagtatggtaaaatgataagtataatttattgaatgccaataacataattttagagctttgacacatagtagcttttccttaaggcatcttttaggttacttctcaccctctttcaagtttaaaatgaataaccccatccatggttcctgaagataaagattagtgaagttggtcatatttgatttttgctttaactagtaaaggtgctttgggtgtagaagacgatgaactattacaagctttatcagagtatcaagctgctaagagttgtctttttaatttattcaacagtgtgtgaaagtaaagacttacctgaaacagttagaacagtattaaaacaagaaatgaatcgtctttttggagcaacaaatccaaagaattttaatgaaacttttctgaaaaggaattctgattcattgccacacagattatcaggtaatcactttatttggtccttccagtagccttcttgaacaactttagtattttaatgaatcactgtcaaggtaaggtatatattttgctcaaaatggcaatatgcactacacttttttagtagtaggaaaacaggcagcgtgtagttgcttcttctatattttaaatttttgtgaaacagaatcgttacagtaaaacaagatatgttgtttctactggttcagaattaacataaataagtacaactgattttttttgggggggggagtaaggtctcactgtgcacccctgcctgatgtgaaagtcactgtgtaaagaaggctagcctctaattcacaaagatctgcctgcttctgcctccaggttctgggactaaaggcttgtgccatctcacttagaagtacaagctgaattaagcaggttttatctccagtacccaccaccccagggtgaatttgtatatattataaaactgtgcaagtaaagcttgtgttcttctcatgcttccattattgtgattataaagctcacttaatgtgattttgatttctcatgcttatgtatttatcagacttggtaagctaaacacctgaaaaccatcttacatttcagaaagtttgaggcaataagagtcagtcacagtgaacaaagtctgggctttattactgtgcttttataagattgttgtcacacactattaatcccagaactgtggaggtagaggcagatggatcttgtaccttccttgtctacctagcaagttccaggccagagctacacagtgagctctgtcacagacaaaacaaagcaaacctggctaaagcctagagctttgtatgccattgtaggaaggtgaatgcaagctttcatcttaggccattaagctcatggctgtttctctcattgccttttcccatgtgaaattactgaaccatttgaaaatgatttacaatcttattacaccaacacaggtattaaagagtgtttgtattgcctcatgttgtttgattatgtatggtttaactaaaattctgttccattgggcggatctcttatgtatcttaatcctttaacagtagacagtccgatcctcttagggtgttactgtaataacagtgtctctctcccatggctataacatatagcactgcttgtgcatacgttctattttaaatcagaatgagtagatgccaagactgttcaaggttcttaaactaaggcgcctcccctttccctcccatttagctgccaaaatggtatattatttagattcttctagtcagaaacgagcaatagagctggcaacaacacttgatggatccctcaacaacagaaaccttcaggtaaccgggtctacttatttatttattttaagtaatctctctgtaagagaaactaactactcttttacttctcactaaaagttttaaggggttatgtgtttgtgtgtgtgtgtgtgtgtgtgtgtgtgtgtgtgtgtgtgtgtgttcttatgtacaagtatgccaggttagttggtatatagtaaatagtttcgtgtatataacctgaaataactttacttaaaaaatatgttatgataaaattacgtgtactcaggctggagagagggctcaattcccagcacccacatggtaccctcttctggcctgcaggcatacatatagacagaacactgtataggtaataaataaataaatgttaaagaaagaaaatgaggaatgcacataacatgaaacattttaaaatgcagatacaagtgtgtgaaagaagtgtgtgtgtgtgtgtgtgtgagagagagagagagacagagacagacagacagacagacagacagacaggacctgtttttctaatcactttgtactggacatttttctgcttattggggttgtttgtgcatcaaggattgctcttttaaaaaatatatttttgtatttgagtggttttgcctgcatgtatggatatgcaccatatgtatgcttggtgttcttaaaggtctgaagagggctttggatctcctagaactcaaggtagggatagttgtgaaccaccgtgtggatgatgaaaaccaaacttgaggcctctgcaaaagcaacaactgctgagccatctctctagcctcaacattccttgatttgaatttggggtttaatgataacaggaatagattttgctatttgttgagagtagccttggctggaatagaactcactatatataacatagaccacactggccttgaactcataagggtccacttgcttatgcctcacaagtgctgggattaaacatgggccaccatgtcctggccagtatttgtcgtggctcattgcttccccaaaagaaggaaagttaatgtcctatatgcagagactggcagagactggcagagacattgtaagtttaacatttatacatagggtaaattaatgtcatttcataaggttgtgtacttgctcaaagtacccttttaaaaaacagtacttttagcctggtggtagtggtggcacacatctttaattccagaagcaggtggatgtctgagttcttcgaagtaagccagggttatacagagaaaaccaccccctccctttttgttttgttttttgttttttgttttttgtttgtttgttttctagagaaaacagtgtttctctagctttggaggctgtcctggcactcgctctgcagaccaggctggtctggaactcacagagatccgcctgcctctgcctccctagtgctggattaaaggcatgcgccaccaacacccagcacccattgcttttttaatgcctgtgtatctcatcaaatgtacatactcttgtctttgtttaattttgctataaacccccatttcaaccccatggttgaaatgtctcataagacctgttttgtgctgaattctaacatgaccttttcttttttagacttgcatggaggtattggaagccttgtgtgatggtagcctaggagactgtaaagaagctgctgaagcttatagagcaaattgtcataagcttttcccttatgctttggctttcatgccccctggatatgaagaggatatgaagatcacagttaatggagatagttctgcagaaactgaagaactggccaatgaaatttgaacatcattaaacagcaaatggaatgactttggaccatatctagtgtataatatttttgtcacgcacctgctgcattgctctaacttacacagaatgagaggagtaaatgttcttgccttcaaatagtcttttacgttttttatcctgctgaaaactatatataaaatatctaacattacaggatataggttcagtttcttaaaaattaaaagctgctaaaattgaggggtttaaaaaaaaattccatatcgtactcctaccttccccgcccatgtttttaaactaatttatataaaatctggaggctattacagctaacatagcaggtgtgtggcagaaatattactttaaatttgtcttgtgagattttactatatctcagacagcataaatgctgttttagcactggattctttcactgagcacaaagagttgttggggctttagcatctgactgattttgttacggggttgattcttgaccataggaagtatgcaatgtgaatcactatgtacagagccatctacaacagacgcttgacgttgtagagactgggacacatagctaccaagcagattatatgaaacctagaaggtgttcagtacgtgtgttgtgtttccaaaatttgctgtacatgatcagtttggtgttcttgtaccacagtttttaaccgaaggaaccagttggaacaatctcaattttaacaaaaacttgaagaactaaaataacaatgcaaatctttagcattgttttggccaaacttgttaaaactgtaatgcaagaaccaaatgcactgtgatgtggcaccaactaattagcaagcatgaatttttcacctgagagtgaaaaaaaaaaaaaaaaaagaaaatctaccatggcttgaagttaaagagcagaactcctgactaccattctatgactgatcaagagactaatagctaaaaacctcagcaggccttgttcacgatatgcagaaaaaagtgctgcagtttagatacctctggaacttttccacagtgtcacaggtttgtaatacttgaagcccttcatttctaagaatatatttcttgctcagttgtttcaggcaagcccaagactttgtaatttttaaaggtcccaagattttcatttcaataacagaccagcttctttttcctgcagttacaaatgtaatttcttttttgttgtcaaacataaggtaccaaatatgatgcaataaattgttttgaaaaacagttgtgtgaatatttccactaatccgagttgggcttctgtgaaatacacaggtggaaacagaggttgcaagccagaggcaatgaaatgcactgtagagttagtacagatgggagctttttagagtgggctaattgatggtgtcagggaagttccagaataaagtagaatgctgctcctttgttcagatttcactgagggctaggattgtggcaggtcctatgaatgtaattcataatctgaaaggaaaactaaacacgactattttgattgggaaaatgagccttaaacatgtcaaacctgtacactgagaactagcctcaggctcaatattctctttatgtttgcaaggtctgagcaattaagtttaagtaaaatgaattaagtgtatataaaattgaacttttgtagtattttagttatagatagttcatacgctaaagggaattttcagaagatcaaatccttttatttcatagtacatgatctgcattccacatcccagtctaacaggttagtgatgcaaagataatcgtagtctgaactccagtgctttgctttaacaggccctgtctcaggaacatcttaacagatggcaaaaaaaaaaaaaaaaaaaaaaaaaaaaaaaaaaaaaaaactcttcttaaaacttaaaaatttctcctatgagtggcaactgagactcttattgtatggaaaaaacactagtgcttcctctgccactaattcagtgttggaggaggcaccagccatatagtaggcgcgagcgcgcgcgcgtgtgtgtgtgtgtgtgtgtgtgtgtgtgtgtgtgtgtgtgtgtgtgtgtgtgtgtgtctgtgtgtgtgtgtgtatttgtttaagctctactgtatatcacaatgaaatccgtctatttgtcttgacaatgttcaaacaatgtagattgtcttagaaggactcagaaggactgagactctaatgcagatgccacccgagaggagctaaattcctatcatgtatattgtatttcaacccaattttactggaactattgaataaatcttttattttctttcaggtttacttgatagtgtatacattgtctggtgtcaaaggaccttgactgggttcacctaaaacattgtactgtactctctgagtatatcaactggatcatttcacatttgccccatccatattcagttaaaatccagtgatactgtgggggaaaacagggttagataaacaagttggaaaaatgcagtgtgatgttgtaatctaaacaagtgccttatgtttattgctaagaactggtgttatcaacccttttaataagaaggggttctctcggcctgtattaatataggaaagtaaagatccttttgtttttctttatatttccttattgtcatttctcattgaaaagctaaactctgactagcttagtttacttagctttaattagatagttgagtcatacattttcactattttttctgtatttattatgcacaacaataaaatgatctctaatagcatgactaaaagtagtgccgatgtcactggaaagctttctgggtcttattaggccctgcttttttcaccatgattgtactgcatgctctattgctctcggagctgtgaaatgaaaactgtgattgtatgaagagctcagagaaccatggtccagaatcaggttggttgtaacaaactcagagaaatctgttttgatcacttggtaagacttatttccattgccatgcatagcatccatttggggaaagcttaaaaaggagagtattgaatatggtacgtgtttcttttaggtaattactgtccttgaattctatagataatgaagctaagagaattcagaccaacctttctgatggacggggtcttccttttctgcctcatgcttgatttttttaattgaaagattcttaataccattttgctattgtccaagttttgctaaatcaattaagtctaagacacaaactctacgaaatagctatgtcacaccacaggaagcagaaattgtctcagtttttgctggttagaaactacaatttgtagcaataagttttgggaaaggttatttatcaagtttcacttttcccttctacagctatgaaatgcatatggaaagtcttttttagcgtgtaggaggttctggagaacgctgttatttaacaaataatgtcttacatatattctagttcatatagtaaaataactaattccatgaagacatactcatgaaaatactaaaaacaagcaaagggtgctgtgtgtgaggatgcattcctgcaaccccagcacttaggagatggagttgagggccagtgtgaaaggaaagaaagaaagcttaggggaaaggtattaagagtctagaagtctgcagtttgttagttcatgcagttagctctgaggcatcattttgggatggtagctagaagaaagagaagtttggtgtaaattggaaccccagtgttctgtgtacctaaaccagactatagcctttgtttcaaggttgcttataccaaatgtaaggatattactagcagtgctacaaaaccattctgaggcctgtcatattttttgagacagtatctcactatgtaccactgcttgcctcaaacataaaggtctgaattcctctcctgagtgccgggattaaatacatgtaccattatgcctagctatgaaggtttaagatgagtgggggtttgcacatttgtgtgaaaatgcatgttgtggaggtcaggacaacttaggaatctcaccatccacccttatgtgtgtttcagggatcaaactcaggttaccaggcttcatggcaccttaacctgctgagacatttcactggcccataagtgaggctttggtctctagttcaagaaactatttcgtgcaagatggtttgtttctacatgttggtaatctcattgtattgtaaagatgtctggctcctctgagaatgcactgtcttctcatttaggaggaacaggaagtgaggtgattttgagagtgtggtctagatcttgagttgatttcaactaatgatgcttgtcttctatgtttacatgtatatgactggcacagggaccatctgtgctgtctgtggttttccattatttggtcctgaatgaatttgccacctgtttacattgtaattggagtttttcagaacacactcaaggctacattgttcttccaaactggcttttcttaggagctctacctatcaaccctcaagtaatcatattgctgctttgtttcttttaaaatgaaaaagttgccatttaaagtagatggtaacaagactatcacctggattctggaataccaaatactcataactcttctgttagttaacttagtttttttaaaaaagtgagagtaatacacatttaagaacatgtattcagcattacttgttcagaagttcattaaaaaggacctaagaataataagccaactgcttcagttgtttttttttttttttagagttgaaaaagttttaagcacttcattttcagcttactgactagaactatgtaaatgaaatgtccagttgtatcatgaaattacgtgaccactgctttggctcaaattcctttaagtccacacacacctttaatcccagctctcgggaggcagaggcaggtggatctttgagttcgaggccagcctggtctacaaagtgagttccaggatgaccagggatgttacagaaactgtacacccccaccccccaaaaaaataactcttctgtaagtccattttaaaatttgcctttattgtatattgtgtgtgaacttggagatcaaagaacaatttgcagggatcagttctcttcactcatcatgtaggtcccaggatttagattgccaggtttggtggcaagtgcctttacccacttagtcaactctcctgtctgtaaatctataaaaatcttaaaacagccaggtggtgtggtggcacacagccttaattctagtactctggagtcagaggcaggagggtatcaatgagttctaggacagcctggttttcagagcgagttccaggagagccaggattgttacacggagaaaccctgtcttgggggaaaaaaaatttttttaaaaaattacatagggatgagaacaatgcataatagatattcaaactcttaggaagtagcaatgatggtgaacttaggtcatctgcaaaatcttaaattttctatccttttatctgtggttatagaagagtcatcttgatactatctgttggccataagaaatcatctcaaaatattacagatacatatttattgatgttatcagtatttttccacatgtaatttttgctcttttttttttttttgtcagaaatggttgtggcttactttgtagggcacaggtgctggaagtaccatctgtttaattttctccattgttgtgatactggttggcagtgaatgggttcatcttatatctttagcaggctctacttaggtactgacatgcctattagaagtgactgactgcaaaggatgccacttcaaagaatataaggcattggtgacagacatgctacatacctagacttttaatggtctagtatctttaattttctagcttctccacaccatagtcagtcaatgacagccatcagctctagtctgccagtgccttcctctatgtgattcagtccttaaaattataagcttaacactggttctgtattcaactcccaggagaaatctgaaaacacctgtgtttcccaggcccactaggaaagttgattaaaatgatctgcagctagtattaataatcagtattgacagctgcctgaccctgacctttccaagagattgtaaggtacatccaaagtttagaggcagtctcagtctaagtgtgtgtatgcctttaatcctagcactgaggactcagaagcaggtagctctcttaaactttgaggatagcctggtctacagaatgaattccaggagggcctagagtacacagagaaaccctctctctaaaaataaaaggaaaactatggaagtacagagattgtggcttctcttacactaagtaaatgaatccagaatttttgttaacagcttcctgattggtttcccatccacactgatctgatacttcaatcatgcctactatactgagatacgagtagagaacaaagaaaaagccaacctatttacttcattgaaacaactttaaattttcccaaggcacagcactttgtaagtggacgcttgagcttttaaataggtagatctagtacttcctgaaaacaactgagtctggccctttgttttccctataagattgcatttgctataaatgaaccattattacaagtgttagttgtgacaggaattttggtagagtgtttggtaaggaggttgacaggctctagagtcatcaagtaaacttacctttgggggtgtttgctcagcaccctcagatctagctagtatttttagttaataaaaggaagataacttgtcaccaagcctcatttgtgtctggggtgttttctgctggctaatagttactggacaagtaggattgatgctattccttgccattcttgggtttatgtcttttgttcctcaccttggcacacctgaaagtctacacttgccatctgtcttcacagaaggttctccattagtaggtaaatctctttgatgttgtgaatcaactgtcaagtaccagtacaaaccctctgaggtttagttccccggcagtataatggagttaggacagcttgtagatgacttagatctctcacacactgtacaaaaaattcttaggtcaaatagttggaagagttaatgtagatgggtgtttttgtcctgtttagtcccaaataaacacacagcttatattaattataaactgtttggccgatggcataggcttcttactggctagctctctcttaattattaacccataactattaatctgtgtatttccacgtggccttatcttaacaggagaatgctccggcatcctaccttcccagtagctacatgaagtctccctgactttgcctctgtccctgtttggatttcccacctggctgaatcctgcctgtcccttggccgaaacagctttattcatcaaccagtaagagaaacattcacagtaataggacattgccccatcatctttgcctctatgtgtttatttgcaactgaactgctgcaggaccaggcaggaaagaagcatccacctacaagttaacactttgattactgcagcccaatacagagtaaacacccactttaaaaaatgaagttattctcatcagtattgcaatttttattattcttgatcatcattgtctactgtggtacattgggccaatatttcaggaagtagtttattttctgatgcacttcaattttaactattaaaaattatatttgtataaaatgcaagagtatctaaaagggatggataagtaaactatactttggaaggttctgtagctaaaatgaatggattgacagaacttaattaagaattaccttccatagagctagcgagatggtttcattggtaaggccttgccatgcaagcatgaggacctgagttcacactcctgcatctacatgaaaaactggcctcctttcagtcctttcaggacttagagatggaaggatccctgggggtctgctggccagccaggctttaaatgggtgatttcctggttcagcgagagaccttgtctcaaacactaaggctagtgagatggctacaggtgaacacattagatatcaaccccgatgacctgggacctccataatgtgtgttgtgatgtgctagcccacatgtacacaaaaatgtaattaaacagataagatggatcaggtatcaccattctgcagacagaggcaggaggatctgtgattcaaggctaccctggtatacatagtgagctccaggacagtcagtacccggtctcataaaacaaatggcaataaggcagaatgtgggtgtgtggtgggacatcagttccagcacttgggactcagaagcaggcctagtcaacataacaagttccaggccagccaatgatacatagtaagagattcaaaaaaaaaaaaaaaaaaaaaaaaaaaaaaaaaaaaaatttcccccctcaaaaaaagaggctacctgacattgacctctgactccacattaacatatactatacatagatttaaacataaaggaaaaatgcaatgcaactgatacaaaatatcccaggaagaagaaggagtagggtgggggtgtcaaagtcatcacaagggaatccacagaaacaactaagctgggctcataggtgctctcaaactctggaccaacagctagggagcctacatgggacctacctaggccctctacatatatgtgacagttgtgtagcttgttctatttgtaggactcctagtagtaggatcagggcctgtccctgtggtgatactttgcttaagatctaacaaataaagcttgcctgaagatcggagtgcaaagctagccacactagttagccatagaggccagacagtggtgatacacacttttaatcccctaggagcacttaggagacagaggcagatctctgttaaatcaaggctaccctgagctacacaaaattgatccagtctaaaagagaaacagagctcaaagatgatctcagtatttgggatcccatacctttaatcccagcactagagaggaatataaggctggaggagacaggagctcagcgcagtctgaggcttggtggagacagatgcagtctggagatgcagtctgaagacaggatctcctttcaatctgagcattgttagaggtgagaactctctagtggttggctgctttgcttctctgatcttcagctttaatcccaatatctgtctctgagtttttaattattaagaataattagaattcttgcttcatgtccctaatgcaccagctggctctttggaacctattccccctactaggttgcctcacccagccttaatacaaagggaggagctcagtcctacctcaacttaattagtatgccatgctttgttgatacccataggaggcctgcccctttctgaacagaagcagaggaatggatggggggcagggcaaaggggaggggaggaggaaggggaaattgtggtcctggtgtaaaataaatgaaaatttttaattaaaagaaaagccaagaaaatattccaggaggaacaatttgtacctagttaaagaaatacacgaagaatgtgaattgtaacgagaaatgaagtttcaaccagaaagaagtctgagtagaggcttgccacaggaaatgggtagagtccagaggatgatcttgtttatctgattgcccagctccacctcccaagggccagggttcaagtgcatcaccatgcccagttttatgtggtcctttgagttggggctttgaatatgctctgtaggctctaccagttgagctacatccccagctgaataagtgtcttggattttttagtgatttttaaaaatgactatttctggtactagagataattctgtgcctcacacatgctgagcatgtgctataccattcagcctggcattgtgtcacaagtctattagtgttactgaagatggtagtgggaaaactagagcatccaaacgctgtagccaccagagggcgtgagtgaaaagcttagtggccatcccatcctattttggagaaatctcttttttcactatacaaatccactgtaggaaaaaaccagatttagtcatttataaacattgttctaagactgttgacatttttaaggcgttttcttcagcattggggatctttgtgaggcaagtgctactgagcctcatcctagctctgtgttgacattataacattttcttcacatatatttttttttatttgacattatgtggacacattaggtatactgttgttgtgtggactctgttgggtatactgtttgtttatttgagagcagatcttgctaaattcagcaggttgactttgaacttggcatcctcctgccttaccctcccaaggttcccagctatgtgccacctaacctagttgacaaacttcaacaaatttttttcttcttttaacacaatgtattgaacccatgccttttatatgccaagcatatgttctaccactgtcttggcaatgcagataggattttaaaaaaaacctttggtattttatctagttgcatattcaggagtatttccagaattggaatgcctaggcaaagcccatgtgctttttttgttgtcgttgtttttgttttgttttgttttttgtaaaaaccaccaagttgtctctcactatgtttttgtgcctggtagagcatggccccttatcattaccatcctttagactatgacaggccataccaaagtgtcagatttcttcatgaaatctgaagtcattcttggatgactccggcccttgctttgacagttttgccgccatgacaggctacagaaaagaccccacaagatgtagccctgaatcaacaggatgtgctgtgcccctgaccttacctgaccttgccctagataatgggaaaaaatacaagatatcccccatgtggtaaagagccagtcagaggctaggctaacaggctctggacccgatttactgataaggatagaatgtagtaaccacagcaaccgccaccagatgccgctttagttaaccagtcaccttagaataggtacccccagtctggagatgtgccaatcctgagacagttaccatgcagcttacaggccccaagatcccccttgctctatccctaataaatgtcctgcatgactgtggctcaatgtctctctcctgcttcaccactttattggaaggacaagagacctgagttcaaactcgcaattaaaaagactctttgcttttgcatcggatctggtctcttggtggttttggggggtggggtccaaactctgagcacaacaatcctgtcaaattttgcaccttactttcctctataaattccatttatttggctatatatggtggagcatgactttaattccagcattagggagacagaggcaggaggatctcttggagttcaaggccaacctgatctaaagagggagttccaagatagtcagaactccatagaggctctgtctaaaaaaaaaaaaaaaaattcatttatttgtttgtgacatggtcagggtctggctatatatctgaggttgggctgaaagtatgtagcccatgctttatttgggagctggttggtggccaaaagaaaatgccaactacagttatcttcctgccttagtatcctaagtgctgagattaaggcatgcactaccatatccagatctacatttccacagaatttaaattggatccaaacctcaagacaaaatgttcaaactgcccaggatgtaataccaaattactgagcacacaaagaatgaggaaaatctcagttctcctagaaacaatgatgccaacactgaatgcagatggcagagttatctgatgaagtgttaaccacttaatgaaggttaatcctcactgttctctcaagtctgcagattcaggcaaagggatcatctggtaggtggggctacaagatgagaagaatgctggggagaggaggcagaaagaagctgccagggagacacaccatgtagtcgctaaaggaatagcatgctggagcctttttggtaaaataagacaatgtagaaatacatagatttgtagttatgggttaataattaagggagagctagccaataagaagcctgagccattgaccaaaaattttatagctaatataagtctttgtgtgtttgtttggggcaaagtggctgtgggaccaggtgggacaagaaactccatgtacaaaatagcacccaatgtgaggcctgaacccacatccctgagattaacagtctcatgctctactgaccgaagcctgagccagtggccaacagtttataattaatagacaactctgtgtgttcatttggggctaaacagctgtgggaccagatgggaaagaaactccatcaacaaagcattatttatgattcattaaagcttgcctgaagattcagaaagcaaagccagccacaggccatagaagccaggcacatacctttaatcccagcatcgagaagctaggaggtagtggtacacacctttaatcctagaactgaggattaagaggtacgcagatctctgtgagtacaaggccacccagatctgcacaagattgaatcagtcgaaaagagaattataatttgcacctttaatcccagcactagagtggtctaaaagccaggagcaggaagtcatgatgaggcatttgttctccagccacactaaggagaagcagcagtttgagacttggtgaagaggtcgtgtgtggatcagccctttcagtctgagctaaaggtgagagctagtgaccagctgctttgcttttctgataatcagcttaaaattttaataaatcatttatattactacaactatcactctccacgataaagatgtgcagatttgtctgccacttatgaacagtttcctgcagagccattgtcctgtaaagtcactacttacttaaggcaggtatcaccagggtctcaaagcatccatgccgggaatggggcatacatgctgatactctgcctctgatgataggtgccctttctttctcacccaagagtctcatgtctcctgttcattactggcactcaaacttgttaacttacaaagttaatagatcagagttcttgactctaaaaattctacatgtaaccactagcattgcataggtcacgcaggccttgaactcacaatctttctgtcccagccttctcagagctgggattataggcatatgttattatactcgacttcagtagcattttgaagccattggaaaaatccagccaggcatagtgctgccatctgtagccctagttctcagtgggctgagacaggattcccacaaattcagagctatttaggggcatattgtgagttctaggccagcttcagctacaatatgagactttttttggtgggggatgagaagatgacttagtgtttagagtgtttgcagagcaagtaagaggctccgaatttggatccccagaacctagagcaatgctgagcaggtatggcagctctcctgtagatcctactttggaagattgagacaagggatctccagagcaagctagataccaagaggcctgaaaatcaagggttgtagcatgcgcccaaagattaactgtaatccgtgatggtaaagtttctttattcaagaaagcaccagggcaaaacgcaggccggagtgaggttataaggacccagcaagcgcggccagaaagagggggctagggtctccacgtgcagtctttaagaagcttccctatgtcaccttggctttccttcaccacgcccttatggcgagtcccgggtctgcctggtacctgtcccaggactattgggcggggctagggtgtctccctacaatttcccttttagtctaaaagaggattaaaacttaatagtgtaaaatatccaaaactaacaatcataaaggtgaaatacaagaagatacaacaatctgctatgacacatcctatgtctattccagctaagttttaaaatcatgtggaaaaggtgtttaacttgaacacctccttccaatcccaactctaaacaataagaaggtnnnnnnnnnnnnnnnnnnnnnnnnnnnnnnnnnnnnnnnnnnnnnnnnnnnnnnnnnnnnnnnnnnnnnnnnnnnnnnnnnnnnnnnnnnnnnnnnnnnnnnnnnnnnnnnnnnnnnnnnnnnnnnnnnnnnnnnnnnnnnnnnnnnnnnnnnnnnnnnnnnnnnnnnnnnnnnnnnnnnnnnnnnnnnnnnnnnnnnnnnnnnnnnnnnnnnnnnnnnnnnnnnnnnnnnnnnnnnnnnnnnnnnnnnnnnnnnnnnnnnnnnnnnnnnnnnnnnnnnnnnnnnnnnnnnnnnnnnnnnnnnnnnnnnnnnnnnnnnnnnnnnnnnnnnnnnnnnnnnnnnnnnnnnnntgggactcaaacataagtgtcatcagagaagtgttcgcttgttcatgtatgtgtactgggaaaggaaatccttgaaaaacaacaattatgagagggtgtaggccttgaaagaaaaagccaagaaaagacaaagatagtcttcttattcttcatttattctgtattacagcaattggcttcttgatataacacagaaacttttaaatgttgttaaataacatgcttggattttagagtaggaaagccaaatccaactctaaatcccacatcgatttaattgaatagggactaggaaatgaagagacatagagttatttgagagacagctgtaaattttgtaaattttgtaaattttatggcatgttccttttgttcgatggttatagctacattctttccttaannnnnnnnnnnnnnnnnnnnnnnnnnnnnnnnnnnnnnnnnnnnnnnnnnnnnnnnnnnnnnnnnnnnnnnnnnnnnnnnnnnnnnnnnnnnnnnngaatcttgatcaattttgatggtatccaaagattttcttttcctgtggagacaaatacaaaacccctaccccaacgtaactcatgtccaggtttccataccgaggtcagcacatctttgaaatacactggttggttcagttcagcagttttttccgtagtccagtgtctttccgcagctataaagcattatgcaatctatgtttcgggggtttcgacttaccagcttgcctatggagcatctccttaagtgtcctgttagacctttcaacgactgcttgtcttgtagggttgtgtggtatacctgtgacatgcttaatgttataatatttgaagaactgttccatttttgtggagacatatgctggagcattgtcagtttttatctgcgccagtatacccataactgccatcacctccagaaggtgtgtaataatggaatcagcttttttagagttgagagcagtagcccattggaaacctgagaatgtgtcaatggtatgtatgatgcacatatttcaaatttccaaattctgtaaagtgaaagatatccattcctgcgttatctttttttcagcctgtcatggctgtagaattgtcaaagcaagggcctgggtgagggcctgagtcattcaaggatgacttcagatttcatgaagaaacactttggtatggcctgaaatagtctaaaggatggcaatgataaggaaccctgttctaccagacacaaaaacatagtgagacacaatttgatggtttttacaaaaaaacaaaacaaaaaaagcacatggtttttgcctaggcattccaattctggaaatactcctgaatatgcaactagataaaataccaaaggttttttttttaaaaatcctatctgcattgccaagacagtggtagaacatatgcttggcatataaaaggcatgggttcaatacattgtgttaaaagaagaaaaaaatttgttgaagtttgtcaactaggttaggtggcacatagctgggaaccttgggagggtaaggcaggaggatgccaagttcaaagtcaacctgctgaatttagcaagatctgctctcaaataaacaaacagtatacccaacagtgtccacataataacagtatacctaatatgtctccataatgtcactttgagttcagagtttgactaagagatcctgcctcaggctgggttgatggctcagaggttaagagcactggctgctcttccagaggttctgagttcaattcccagcaaccacaaggtggctcataaccatctataaggagatcaggtgccctcttctggcctgcaggcatacatgcagacagaacactaaaataaataaataaataaataaataaataaataaataaatagagctttaaaaaattgcctcagagagtaaggtgagaaagagtaggcatgcatgtgcccactgcctatgcaaacatgtatcacatacccaccacatacatacacatgaactggagtaaaaagggaagaattgaatgagtcaccaaagtggcaaagaagtgaatatgtgaagaaaaaacatttgtttcgttttttttttttgttttttttatggcagcatctgtttggacctggatgtcttggaactctatgtagatgagaagactgtcaaaattcaagaaatcctcctgcctctgcttcccaaattctggcattaaaggcctgtgccacctggtccagtccaaaccaatatttttgttttgttttgttttgttttaagaagaaacaaatttagctgggcatggtaatgcacatttttcatcccagcctgggaggtagagacaggagtttctctgggagtttgaagctaacctggtctatgcagagtgccaggacagccaggactacacagagaaagaccttgtttaaaaaaaaaaaagtaattttattgatttattcttgtttgcattgtttatcctctgtgtgggaggtttttgttttcaagataggatatctctgaatctgtgtttatttttccaatacagactttctccttatagcccttcctgcaacttgctgtagacaaggctagcgtccaaactcaagagatccacctgctgggattaaaggtgcatgccactaggcttgatgaggtagaatctcttatagccaaagctgccctgtactttacaaaatttcccccatataattttaggcccattttattagtttcaagcaagtttattctttctactaaattcagcctttcattaggtaattcctttctactactactatttttttttaagatttatttattgagtatacaatgttctgcctatgtgtatacttgcaggcccaggagggcactagatctcattacagatgattgtgagccaccatgtggttactgggaattgaactcaggacccttggaagaacaggcagtgctcttaacctctgaaccatctctccaaccccctttctacttctagtaacctgtttttctgccaccacgacaagctagattgtcaactctttgactacacctgtttgtttgtttgtttgttttgttttatgatgctgggatttgaaactgggcttcgtgtatgcaaggaaagcactctaccaaatgaactacatccataacctgcttgttttttgaagacagggtctctatagtggtggacatgggttcaagcaaatagaaagtctttatttgggacccgagtacagtcccaagcctttctcaaggtgagtttttaatcacagaagaaagaaaaaaaaaatcctaggttgacatactttacaagaacagttagccgaactacagtagccgaaaagcaaggttactacattagagaatttcccagaactatggatgttgatggattaggtctttgttttctctctcttcctccctccctccctctgtctttcttttttggcagatattgctgcctaagtgctgggctccaaggcttgagtgatacttctatcatactgtcaactgtgctaaggtgcgagggcctactgagctcggcggggggtgggggggtttgttaaggtcttggctgtcctggagcttgcaatgtagcccaggctggccttgaattcatagagattctactgcctctgcctttcaagtgcaggattaaaatctaggctcccaaccctgaggactccggacttcacatccttcttctgcctccgctgaaactagcaggccttctaaccgtgggttaccacgcccagctgcgtaaagaatttggatttcccaagagtcccacagagatatctacgggatccgggatatttaaagcaagcaaggcttgggtgccaagatccgaggttactaccgcggcgccgggaaaggctcgggcccaggggctgagcagcctcgcactctgctgcccgcgcggagtctggaggaggcggtgagcgtgggtaatgcgccggcccggctgctccctcccagctgctggcactggccagtggcctttgccactgcacagtcgcctctcgcgagacagggtccgggccgcacctccttcctctctgccgactctctccccgcccctgaggagctgcgccgcttcctcctgagccggggaacattggacgtggcggggccggtccgagtcnnnnnnnnnnnnnnnnnnnnnnnnnnnnnnnnnnnnnnnnnnnnnnnnnnnnnnnnnnnnnnnnnnnnnnnnnnnnnnnnnnnnnnnnnnnnnnnnnnnnnnnnnnnnnnnnnnnnnnnnnnnnnnnnnnnnnnnnnnnnnnnnnnnnnnnnnnnnnnnnnnnnnnnnnnnnnnnnnnnnnnnnnnnnnnnnnnnnnnnnnnnnnnnnnnnnnnnnnnnnnnnnnnnnnnnnnnnnnnnnnnnnnnnnnnnnnnnnnnnnnnnnnnnnnnnnnnnnnnnnnnnnnnnnnnnnnnnnnnnnnnnnnnnnnnnnnnnnnnnnnnnnnnnnnnnnnnnnnnnnnnnnnnnnnnnnnnnnnnnnnnnnnnnnnnnnnnnnnnnnnnnnnnnnnnnnnnnnnnnnnnnnnnnnnnnnnnnnnnnnnnnnnnnnnnnnnnnnnnnnnnnnnnnnnnnnnnnnnnnnnnnnnnnnnnnnnnnnnnnnnnnnnnnnnnnnnnnnnnnnnnnnnnnnnnnnnnnnnnnnnnnnnnnnnnnnnnnnnnnnnnnnnnnnnnnnnnnnnnnnnnnnnnnnnnnnnnnnnnnnnnnnnnnnnnnnnnnnnnnnnnnnnnnnnnnnnnnnnnnnnnnnnnnnnnnnnnnnnnnnnnnnnnnnnnnnnnnnnnnnnnnnnnnnnnnnnnnnnnnnnnnnnnnnnnnnnnnnnnnnnnnnnnnnnnnnnnnnnnnnnnnnnnnnnnnnnnnnnnnnnnnnnnnnnnnnnnnnnnnnnnnnnnnnnnnnnnnnnnnnnnnnnnnnnnnnnnnnnnnnnnnnnnnnnnnnnnnnnnnnnnnnnnnnnnnnnnnnnnnnnnnnnnnnnnnnnnnnnnnnnnnnnnnnnnnnnnnnnnnnnnnnnnnnnnnnnnnnnnnnnnnnnnnnnnnnnnnnnnnnnnnnnnnnnnnnnnnnnnnnnnnnnnnnnnnnnnnnnnnnnnnnnnnnnnnnnnnnnnnnnnnnnnnnnnnnnnnnnnnnnnnnnnnnnnnnnnnnnnnnnnnnnnnnnnnnnnnnnnnnnnnnnnnnnnnnnnnnnnnnnnnnnnnnnnnnnnnnnnnnnnnnnnnnnnnnnnnnnnnnnnnnnnnnnnnnnnnnnnnnnnnnnnnnnnnnnnnnnnnnnnnnnnnnnnnnnnnnnnnnnnnnnnnnnnnnnnnnnnnnnnnnnnnnnnnnnnnnnnnnnnnnnnnnnnnnnnnnnnnnnnnnnnnnnnnnnnnnnnnnnnnnnnnnnnnnnnnnnnnnnnnnnnnnnnnnnnnnnnnnnnnnnnnnnnnnnnnnnnnnnnnnnnnnnnnnnnnnnnnnnnnnnnnnnnnnnnnnnnnnnnnnnnnnnnnnnnnnnnnnnnnnnnnnnnnnnnnnnnnnnnnnnnnnnnnnnnnnnnnnnnnnnnnnnnnnnnnnnnnnnnnnnnnnnnnnnnnnnnnnnnnnnnnnnnnnnnnnnnnnnnnnnnnnnnnnnnnnnnnnnnnnnnnnnnnnnnnnnnnnnnnnnnnnnnnnnnnnnnnnnnnnnnnnnnnnnnnnnnnnnnnnnnnnnnnnnnnnnnnnnnnnnnnnnnnnnnnnnnnnnnnnnnnnnnnnnnnnnnnnnnnnnnnnnnnnnnnnnnnnnnnnnnnnnnnnnnnnnnnnnnnnnnnnnnnnnnnnnnnnnnnnnnnnnnnnnnnnnnnnnnnnnnnnnnnnnnnnnnnnnnnnnnnnnnnnnnnnnnnnnnnnnnnnnnnnnnnnnnnnnnnnnnnnnnnnnnnnnnnnnnnnnnnnnnnnnnnnnnnnnnnnnnnnnnnnnnnnnnnnnnnnnnnnnnnnnnnnnnnnnnnnnnnnnnnnnnnnnnnnnnnnnnnnnnnnnnnnnnnnnnnnnnnnnnnnnnnnnnnnnnnnnnnnnnnnnnnnnnnnnnnnnnnnnnnnnnnnnnnnnnnnnnnnnnnnnnnnnnnnnnnnnnnnnnnnnnnnnnnnnnnnnnnnnnnnnnnnnnnnnnnnnnnnnnnnnnnnnnnnnnnnnnnnnnnnnnnnnnnnnnnnnnnnnnnnnnnnnnnnnnnnnnnnnnnnnnnnnnnnnnnnnnnnnnnnnnnnnnnnnnnnnnnnnnnnnnnnnnnnnnnnnnnnnnnnnnnnnnnnnnnnnnnnnnnnnnnnnnnnnnnnnnnnnnnnnnnnnnnnnnnnnnnnnnnnnnnnnnnnnnnnnnnnnnnnnnnnnnnnnnnnnnnnnnnnnnnnnnnnnnnnnnnnnnnnnnnnnnnnnnnnnnnnnnnnnnnnnnnnnnnnnnnnnnnnnnnnnnnnnnnnnnnnnnnnnnnnnnnnnnnnnnnnnnnnnnnnnnnnnnnnnnnnnnnnnnnnnnnnnnnnnnnnnnnnnnnnnnnnnnnnnnnnnnnnnnnnnnnnnnnnnnnnnnnnnnnnnnnnnnnnnnnnnnnnnnnnnnnnnnnnnnnnnnnnnnnnnnnnnnnnnnnnnnnnnnnnnnnnnnnnnnnnnnnnnnnnnnnnnnnnnnnnnnnnnnnnnnnnnnnnnnnnnnnnnnnnnnnnnnnnnnnnnnnnnnnnnnnnnnnnnnnnnnnnnnnnnnnnnnnnnnnnnnnnnnnnnnnnnnnnnnnnnnnnnnnnnnnnnnnnnnnnnnnnnnnnnnnnnnnnnnnnnnnnnnnnnnnnnnnnnnnnnnnnnnnnnnnnnnnnnnnnnnnnnnnnnnnnnnnnnnnnnnnnnnnnnnnnnnnnnnnnnnnnnnnnnnnnnnnnnnnnnnnnnnnnnnnnnnnnnnnnnnnnnnnnnnnnnnnnnnnnnnnnnnnnnnnnnnnnnnnnnnnnnnnnnnnnnnnnnnnnnnnnnnnnnnnnnnnnnnnnnnnnnnnnnnnnnnnnnnnnnnnnnnnnnnnnnnnnnnnnnnnnnnnnnnnnnnnnnnnnnnnnnnnnnnnnnnnnnnnnnnnnnnnnnnnnnnnnnnnnnnnnnnnnnnnnnnnnnnnnnnnnnnnnnnnnnnnnnnnnnnnnnnnnnnnnnnnnnnnnnnnnnnnnnnnnnnnnnnnnnnnnnnnnnnnnnnnnnnnnnnnnnnnnnnnnnnnnnnnnnnnnnnnnnnnnnnnnnnnnnnnnnnnnnnnnnnnnnnnnnnnnnnnnnnnnnnnnnnnnnnnnnnnnnnnnnnnnnnnnnnnnnnnnnnnnnnnnnnnnnnnnnnnnnnnnnnnnnnnnnnnnnnnnnnnnnnnnnnnnnnnnnnnnnnnnnnnnnnnnnnnnnnnnnnnnnnnnnnnnnnnnnnnnnnnnnnnnnnnnnnnnnnnnnnnnnnnnnnnnnnnnnnnnnnnnnnnnnnnnnnnnnnnnnnnnnnnnnnnnnnnnnnnnnnnnnnnnnnnnnnnnnnnnnnnnnnnnnnnnnnnnnnnnnnnnnnnnnnnnnnnnnnnnnnnnnnnnnnnnnnnnnnnnnnnnnnnnnnnnnnnnnnnnnnnnnnnnnnnnnnnnnnnnnnnnnnnnnnnnnnnnnnnnnnnnnnnnnnnnnnnnnnnnnnnnnnnnnnnnnnnnnnnnnnnnnnnnnnnnnnnnnnnnnnnnnnnnnnnnnnnnnnnnnnnnnnnnnnnnnnnnnnnnnnnnnnnnnnnnnnnnnnnnnnnnnnnnnnnnnnnnnnnnnnnnnnnnnnnnnnnnnnnnnnnnnnnnnnnnnnnnnnnnnnnnnnnnnnnnnnnnnnnnnnnnnnnnnnnnnnnnnnnnnnnnnnnnnnnnnnnnnnnnnnnnnnnnnnnnnnnnnnnnnnnnnnnnnnnnnnnnnnnnnnnnnnnnnnnnnnnnnnnnnnnnnnnnnnnnnnnnnnnnnnnnnnnnnnnnnnnnnnnnnnnnnnnnnnnnnnnnnnnnnnnnnnnnnnnnnnnnnnnnnnnnnnnnnnnnnnnnnnnnnnnnnnnnnnnnnnnnnnnnnnnnnnnnnnnnnnnnnnnnnnnnnnnnnnnnnnnnnnnnnnnnnnnnnnnnnnnnnnnnnnnnnnnnnnnnnnnnnnnnnnnnnnnnnnnnnnnnnnnnnnnnnnnnnnnnnnnnnnnnnnnnnnnnnnnnnnnnnnnnnnnnnnnnnnnnnnnnnnnnnngcccgggaaccctgtcgcggaggaggcgccattcccgaggcttttctcctccgcatcagctcggagagagtcgggaggatggcttcggagatggagtcgtctctggaggtcagcttctcgtccagctgtgcggtgtcaggggcgtccgggtgtctgcctcccgcccgctcccgcatcttcaagatcatcgtgataggagactcgaacgtgggcaagacatgcctgacttaccgcttctgcgccggccgcttccccgaccgcaccgaggccacgatcggggtggacttccgagagcgagccgtggagatcgatggcgagcgcatcaaggtgagccgatggcgggggtgggttgggggctgtcactgcggagggctttgcaggtatctggaccgcaccgtggctctgtgcaggagtgtgcgccctgtgtgctgccacgctggcgtgcaaagtgcgtttgtaagtagcaaacttctgaggcactgttcccacactcctaacgtgcatcagttttacctggggcatcttgtttttcaaaaaagcacgtatgatttggtaagctcccaaatgacgcacatgcaacgagtctgtggaccacactttgggtgtcaatagtgtaggggagagccattaattccccacccccattacctgagttaagtgctgggaaatattttcaagcatagaaaactcagttatttctaagaattcatttgaacattgcatcattgctaagtattgtggaaataaagcctgttgagtttgaggcagtttctgtatgataatcaatttgtttaggaaaaaaatctatattttcctattgaagcattatatatgttatggttcttaagtgagttgccaaaatcatatctcttgatgcaagcacagaccctctcccaggtggcttctaagacatcagacactgtagtcatagtaggataggccgagacagccaggactgggattctgaagggttgagctcctgggactgcagaataaggatccttgtcaagtcaggaaccttccgatggtgtaaaccttgacactctattgcaaaaccactaagtttacttaatagaaatccttaaaacctgtgaagtggggttggaggactgcagtgagaccccatctcaaaatatgaaaacaaatcaaaacctgcacaagaaacctaagaactccgctgacttccttagcaactgcttttactttgctttacattgggtcctctacctcagtctacttggaagagctttgatttgctcctcctaccttctatccttgaggcaccgagtttctttctttctttctttctttctttctttctttctttctttcttcctttctttcctcctttccttccttccttccttctttctttcttcctttctttgtttctttttttgtctgtttgatttttgagacagggtttctctgtgtagttttggagcctgtcctacaactcactctgtagaccaggctggcctcaaactcacagagatcttcctgcctttgcctcccaggagttctgggattcaagacatgagccaccaacaaatggccaaagtttctatttctttgctcaccacccctccctgccctcaaagagcttttaccccttgtaaagaaatgggggagttatctgagtcaagagaccaccttctctaggccccttggcttttccatgtccatttatttttaagtgtgtgtgtgcacatgtgtgcataagtgtgtgtatgtgggtggggctaagtctagactatatgttcatgccagtcttctgaagttgctctctgccttacatttttgaggcagtctcccaatgaatctggagctcactgattctaatgagacctatctgactaacaagcctcagggatcctcctgagtctgcctccctaggtctgggattgcaggtgctgaggtccaaatttagtttgacaagtgctttcttaatttttatttttatttttttgggatagggtttctctgtgtagttttagagactgtcctggaactcactctgtagaccaggttggcctggaattcacagagatccacctgcctctgcctccagagagctgggattaaaggtgtgtggcactactgccacaaccacccagcagcaagtatttccttgactggacggatcatcttgttcaggctgccagtactggtcatttgggtacactgtagtataaagtaaagggagatttatgagactaaggtatgattcagtggtagggtgcttactagcatatgcagggccaggtgttttatccttagtgggagctgaggaaggagatttgtatacatggcaagaagagctagatgagtagaaggtgatttttttttttttttttaagcaaaactaggttagagatggaagttggtggcaggagaaaagattgaggcttccggtgtgtgcatgtttagcctggggtaagcagttgtggggaagttgctcaggcttaggagcccaactcacacaggtacaagtgtgagctgctgaaaagctttgggttgtggggtagcttgaatttgtctcctgagttcacgtgttggaaacttaatttccaagtccataaattaatgagacttggagatgggacatttgggaggtgattgggtcctttggacttatgaatgggttaatcccttcgtagattaattaatctaatcttttgatggggcaagggattagttcattcataaattagtggattaatctcatttatggattaaagggttattgggagtggcttgtccacttataaaactgtgaaccaaataaaagcctctattctcctgattagtcagccttggaaagttttgttatagcaacagaaaacagaccaatgtatagggctgtcaggctttttgcttttctgtttttttttattatattttttgtatttatctatttaattttgagtcttttttaaattaaaatttatttatatttcttgtgcattagtgtttgcctatatgtatgactaaactgggtgctgccatgtgggtgctgggaattgaacctgggtcatgtagaagggcagccagtgctctttttgtttgtttgtttcaagacagggtttctggatgaaggctctagcatggcatttaaggcagtcttcaatttgattatcagagaacggtatttaaggtagtctcttactattgcttagattcttagttgtggtcatccttgtggatccctgggaatttccctagtgccatgtttttcattaagcccataatggctccctctattaatgtaattctttccttgctctccttctctgttctccccccaactcgacctttctgatccctcatgttctccttcccccctccccttctcccctcctttttctccttcctctgtccctctttcccccatgctcccaatttactcaggaaatcttctccctttccccttctcagggactccatgtatgtctctcttagggtcctccttgttcatccagtaactaatggaagcagaaacagagatccacagctaagcattgagccaaactcctggaatgcagttgtagagagggaggaatgatgagcaaaggggtcaagaccatgctggggaaacccacagagacagctgacctgagcaagtgggagttcatggactccagactgacacctggggaaccttcgtgagacagaaccaggcccccctgaacgtgggtgtcagttggggggcttggacagtctatggggctgctggcagtggaacctgtatttatccctagtgcatgaatgggcttttggaacccattccctatggagggatactctgttagcctagatacagggtggggagggcctaggtcctgccccaaatgatgtgacagactttgatgatccaccatgggaggcctcaccctccctggggagtggatgggcatgctgtgcatggaatgggaagatgggggagggagaatgggaggacagtaggagaggattagtatataaaataagattgtctttaatttatacttttggttgtgagcctaacctttaatggctgagccatctctccagccctgttttttgtttttttgtttttgtttttttttttggttttccgagacagagtttctctgtgtggctttggagcctatcctggcactcgctctgaagaccaggctggcctcgaactcacagagatccgcctgcctctgcctcccaagtgctgggattaaaggcatgcgccaccaatgccttgctccagccctgtttttaatttaaattaaaaaattaaaaagaaaaaagacaaagtttctctgtgtaacagcctggctgtcctcgaactcgatttgtagaccaggctggcctcctgagtgctgggattaaaggcatgtaccatcagccagtgctcttaacccctgagccatctccacccctgagacagtctttctatgtagccctaactgtcctggaaacctctatgcagaccagggtggcctctaactcacctacattcacctgcctttgcctttaatcccagcacttgggaggcagaggtagacagatctctgaattcttgcctagcctggtcacatagtgcagtggctctttttgtttgttttattttgtcttttgagacagggtttctctgtgtagcagtcctggctgttttggaacttgctttgtagaccaggctgaccttgaacttactatgatgtgtctgcctctgtctcccaagtgctgggatcaaaggcatgcaccactgctgcagtggttgttaacctgtgggttgcaacccctttggggaggggtgttgaatgaccctttcacagtcacaagactatcagaaaacacagatatttacattatgatcactaacagtagcagaattacagttatgaagtagcaatgaaaaacatttgtggttggggttcaccacaacatgaagaactgtattaaagggttgcagcattaggaaggttgggaaccactaacatagtgagtttcagaaaaaagaaaattcacaggtatgaggaatagtcttttacacctaggatctgtttaattcagtcattggctcagaataaagaatgtactttcttttatgaaaaaaaaatctcacaaagttatggagccaggggtgggtgtggtagtggccatctttaatcctaacactcaggaggcagaggcaagcagatccgaggttgaggtcaacctggtctaaatggcaagttctaggacagtcagggaacagtgagaccctgtctcaaatgcctacctgcacgagagtgcgtgcgcacacacatgtacacacatacacacaccctctccatcttgtccacctgttcagtgaatctgatagatcaccttagtctcatctgctagagaagtatgtattggttgtggtggcgttggtgttagggctccaaaccatacctgttaggtgagtgctctaccacttctacaactaagctacacccctggcacttaaaaatattttttatattatgtgtattggtgcttcctgcatgtatgtctgtgtactgtgtgtatgcagtgcctacagtggcattgggttcttctggaactggaattacagatgattttaagccaccatgtaggtgctaggaatacaatcctggtctttggggagagcagccagtgttcttaacctctgagccatcactatagccttctatgccttttttaaaaaagggtctcatgtacccaaaggtgacttcaaagtctatataatcaaggataacttcgaactctgaatttgtatgtgtgtgtgtgtgtgtgtgtgtgtgtgtgtgtgtgtgtcccaactaaaaccctacctatcacataccctttctgctcctggggacctggatggtgaggccttccatagggtgtcatcagagtctgtcatatcctttgggatagggcctaggcctacccccatgtgtcttggctcagggagtattcctctatatggaatggactcccaaagtccccacctatgctagggataagtactgaacttctacaggaggtcctgtagatttctgaggtttcctcaatgaaatccaagttcctggggtctggatcagtcccatgctggtatcccagctatcagtctggggagcaagagttccccaatgtccaggtcagttgtttctgtgggtttcaccagcctggtctggacacctttgctcttcacttgtccttctctgcatctggnnnnnnnnnnnnnnnnnnnnnnnnnnnnnnnnnnnnnnnnnnnnnnnnnnnnnnnnnnnnnnnnnnnnnnnnnnnnnnnnnnnnnnnnnnnnnnnnnnnnnnnnnnnnnnnnnnnnnnnnnnnnnnnnnnnnnnnnnnnnnnnnnnnnnnnnnnnnnnnnnnnnnnnnnnnnnnnnnnnnnnnnnnnnnnnnnnntgtgctatcaatttgctcaggggatcttgaccctttccccttctccaggggaccatgtatgtctctcttagggtcctccttgtttactagtgtctctggcagtggggattgtaggctgataatcctttactctatgtctataatccacatatgagtgagtgcatatcatgtttgtctttttgtgattgggttacctcgctcagaatgcaattcttctgcaaatttcaagattccattgtgtaaatgtaccacattttctctatccattcttcagttgaggggcatctaggctgcttccagtttctggctattacaaatagtgctgctatgaacatcgttgannnnnnnnnnnnnnnnnnnnnnnnnnnnnnnnnnnnnnnnnnnnnnnnnnnnnnnnnnnnnnnnnnnnnnnnnnnnnnnnnnnnnnnnnnnnnnnnnnnnnnnnnnnnnnnnnnnnnnnnnnnnnnnnnnnnnnnnnnnnnnnnnnnnnnnnnnnnnnnnnnnnnnnnnnnnnnnnnnnnnnnnnnnnnnnnnnnnnnnnnnnnnnnnnnnnnnnnnnnnnnnnnnnnnnnnnnnnnnnnnnnnnnnnnnnnnnnnnnnnnnnnnnnnnnnnnnnnnnnnnnnnnnnnnnnnnnnnnnnnnnnnnnnnnnnnnnnnnnnnnnnnnnnnnnnnnnnnnnnnnnnnnnnnnnnnnnnnnnnnnnnnnnnnnnnnnnnnnnnnnnnnnnnnnnnnnnnnnnnnnnnnnnnnnnnnnnnnnnnnnnnnnnnnnnnnnnnnnnnnnnnnnnnnnnnnnnnnnnnnnnnnnnnnnnnnnnnnnnnnnnnnnnnnnnnnnnnnnnnnnnnnnnnnnnnnnnnnnnnnnnnnnnnnnnnnnccatttatcaattgttgatctcagtgtctgtgctactggtgtcctctggcttgaggacagagtcctccctccatgagaatgaatttggtattatagttttatacttaaagttattggcttcagaaacttgcatgaatttacccacaaatgaggcagaattcttccctatttactatcaaaaaagaatcagctgcgcactttttgttgaacaatcttctttcatatatatatatatggattgtttgtcaaagatcaggtgtttgtaggtgtgtgggttaatatcagggttttcaactctattccattggtctacctgtctatttttgtgccaataccaagctgttttcaggactatagttctgtaatagagcttgaagtcagggatggtgatgcctccagaagttcctttattgtacagggttgttttggccatcctgggtcttttgtttctccatataaagttgataattgtgctttcaagatctgtgaagaattgtgaaggattttgatggggattgcattgaatctgtagattgcttttggcaagattgccatttttactatgttgatcctacctatccaagannnnnnnnnnnnnnnnnnnnnnnnnnnnnnnnnnnnnnnnnnnnnnnnnnnnnnnnnnnnnnnnnnnnnnnnnnnnnnnnnnnnnnnnnnnnnnnnnnnnnnnnnnnnnnnnnnnnnnnnnnnnnnnnnnnnnnnnnnnnnnnnnnnnnnnnnnnnnnnnnnnnnnnnnnnnnnnnnnnnnnnnnnnnnnnnnnnnnnnnnnnnnnnnnnnnnnnnnnnnnnnnnnnnnnnnnnnnnnnnnnnnnnnnnnnnnnnnnnnnnnnnnnnnnnnnnnnnnnnnnnnnnnnnnnnnnnnnnnnnnnnnnnnnnnnnnnnnnnnnnnnnnnnnnnnnnnnnnnnnnnnnnnnnnnnnnntgatttctccaagacctttatcatgaaggggtgttggattttgtcgaaggctttttcggcatctagtgagatgatcatgtgttttgttttttttttcctcagtctgtttatatggtggattacattgatggatttttttatgttgagccatctttgcatccctgggatgaagcctacttgatcatagtggatgatttctctgatgtgttcttagattcgatttgctagtattttattgagaatttttgcatcaatgttcatgagggatattcatctgtagttctctttcttagttgtgttttttgtgtggattgggtatcaaggttattgaagcctcataaaaagagtttggcaatgacccttctgcttctattgtgtggaatactttaaggagaattggtattagctgttccttgaatttctggtagaattctgcactgaagccatctggccctgggctttttttttgttgggagacttgtttggtaaggttggataaaggtttgtctatgtgtgctggatcctgctgtggagatcgaatccggtgggcaaatccctggggtcagatgtctctgagcagggccaccaaaccacatgccttcaatcttagcactcctgaagcagagatagatagatgtatgtgagttataggcctgccagagctgcataatttgaagttgagccaggaggatggccttaaattcaaggctagcctgactacttaatgaattgtctcaaataaccaaaaaaactgagccagacatgataacacacctttaattccagcactcacagatctatccaaaaagggctcctcagactatgcagctaggcagttgaactgtgtatcaatggctaccaagccttaaaaaatagtcttcctttttaattccaggacagccagggctacatagtgaaatcgtctaaacatacgcaatacaaaagaaaacaaaactacagaaagtctgtacttgctaattgatttctgagtgctgaatacatacgcttgaaagagggaaatcttgttcacagaattttggcaactgaattaaaatgaattccttaaataaaaatacatttgactttcaaattgactgtcttaatccatatgtttcctccttggctgtttagctgtgttcctctctcaacagacattttgtcctggcaggtgcttcagtaaagcctgatatgttgagatttaatccagtctttcatccagggatcagcagtcactatttaaatatgtcagttgtttatagtgggagaagagagattttgccatgttaaaaatgagatgttaatattaactaaggagaaacaactgagatatttcctccccataaatcaaatatatgaagcataaagaatgctattacattgtaaggagtaggaaactgacagtcaagtgctctacttttgtttttatgtggcatgccatctaagaatgagttttgtattattttctgtgctggggttgaactcagggcttcttcattacatgctacacagccagtactcttatcactaagctatacccccagccgtgtttttgtatggttggagaaaatgaaaatgatataaaattcagaatctaccaggtcatcctgatgtaatctttaacttttactccctaaatccaactggcttcctactgcagtttttcctattactcctctcattaaaattctagctgcaatatttcttttaagcctccctttgaggtgatggagcactagtgtgtctggcatgttcaggacaatgaatttcatcctcagtactgggaaaaacttcagacctgactttgaacttttagcagctcagttgatcttatttaggaacagttaacacaagccttcctttgtcgggtgcctgctgcctcttccttcagtcatcctgtagttgagccaagttattggctggtttctcactgtttgcttggaatatccctcctgcctgtattttcctgaaagagtttcaacttctctttagaatcccagccattctgctttcttctatgggaaccccttagcactcctatcaaacatgaccatcttactgtgttatgcatctctctttcctgttagggcaggatctggatctggtaatgcctgcagtattgggttaaagctcaggacctaagtgttcagttatgcaaacaggtcagttgacaaagtgacaaagaaagctaatgaaaacacaggtgacaaagcacaaaatactaggtgactgttgaagctaaagccaaaggtttcagtatctgtcttttgttgatgaagggcgcccacctaggcaagtcatggtaactggaggtgacaactccagaacagaggtcatgagagttaggtggaacatcaacctttaggattttaaagaaaggtttggtttatttttattttatgtgtatgagtgagtatgcatcatatgtgtgcctggtgtccaccaaggggctggaagaggatgttgggttcccagaactgagggctaggtggatggtccaatggctagaggcacttgacaccctgcatcccacaagtgttagtggagagccaacctctgagtcgacctgacctgcctgtgctcatcatggcatgtatgcacctttatacatgcatgtgtgtgcatacaggataaaaattaaaaaccacttactcagtacatttgactcggtgttggcctctgatagctccagcctacaaatattctgagtgttttgtaacctttccccctctattttctttaaaaaactaaacaaaacaaagcattatttttaagactgtacttttcagattttataatctatatttaatagccacatgatgactagactagaatcatgaagtctagactccgcaggtaacacagaaaagacaagctcataagtggcaaggtattagggagcaggtagaggtggttaagttgcttgtgtcactggactgaacttgttgactttgcttcctgtttcccaccctccagatccagttgtgggacacagcaggacaagagcggttcaggaagagcatggttcagcactactatagaaatgtgcatgctgtcgtctttgtgtatgacatgaccaacatggccagcttccacagcctgccatcttggatagaggaatgcaaacaacacttgctggcaaatgacatacctcgaattctggttggaaataaatgtgacttgagaagcgccattcaggtgcccacagacttggcacaaaagtttgctgacacacacagtatgcctttgtttgagacctctgctaaaaaccccaatgataatgaccacgtagaagctatatttatgacattggctcataagctgaagagccacaagccactgatgctcagccaaccgcctgataacagaataaacctgaaacctgaaacaaagcctgcagtgccgtgctggtgctaagtcacaggtatgcccgttatgggactgactgagtctgaagggacacttctgagtaagtgtaattaagtttgtaagattaatcttaaatataatggatcatcccactgttagcgttgttgctctgccttttgtattttgcattctcttaataagtttgtcattgtgacaacacaaagaaaaggtcagtttacagctgggatggaaaatgaagcaaagatggatgagccaggccatatttccagtgccagccaggtgaagcaggcctcctgtgagcatgatacaacttaaaggcgtggtcttggttccactccatgtccctggactgtgaaagaaattcgtgtaggccacatttactgagcagagctaaaggcaagtgacgagttaataaggtgcttttaatttactgtggcatccaagcactaaaaaactaatcaaaagaacccaaacacttggagtttgttttagccacgacttttaattgaaatgtcaaagcaggttcctggtgtcccttgccctctgctcctatcagttgggagattcagggctgattctgtcagtatctgtttggctgagagctctgagggcctgcctcaagttgctgagtctacatgtattcctgtaatagtattgttgggtcaggtttttttttttttttttttaatgtctgaattttatggccacaaactgttcttatataaaaaatgagttaaatattgaaaattatgtgtccctcactggtgaaaggaattttgtttgtttgtttgtttgttttttgagacagggtttctctgtattgctttggagcctgtcctagaactctgtagaccaggctggccttgaactcacagagatccgcctgcctctgcctcctgagtactgggattaaaggcatgcaccaccaatgtctgccgaaagaaatagttttgaaaaatttttgttttgccctgaatacttttagtttgaatttaagactttgcacaaagcaagtagcacattctgttgtttgcagaatggagtgtaaatcatgttcggcctcattctgacagcttacagccctgggcaattttaggggaaattaagccaaaatagactttacttaaatattttcagaatgtaggaaacaaaggcactcagacctagtttcagatttttgtttcattattctgaatgtctcaattggaaacttcagttacaaaagcaagtttattttacttaataaattactaagtgaaagtaagacttttaagaaatggttgtacaattttaaatattagggcccaggttggctttatttgcactgagagagatttttctttttcttttttaaaatagggtggtctcactttgtaggcctgattggcctgggaccagggcagcctcagaccacctgcctcatccgccaactgctggggattaaaggcttgtaccatcagaactagcctattacatgtttcttaatcatgctagaattaaagattaaaaattgtcttacctaaattaatgctgactcgtgagctatttttctagtgaaacatggctgtagtagctggtggctgtagaagtttttacagaagggaatctgttcattgtttttcacactgtacaactggggaaagagcaggtaggatttcccaacacatctgtgctttccttctgtactgtcctcagtgttttttttttgttttaaagtaacagactgtttctttttgtaaggagttaatgagcattctttacaattctgagaaaagtctcatttcttccctttagtatttattaatttaaacatttgtatcttagttgtaacaacctatcactttagtagtttctttttttaaaaagatacttatctggagagcaagattctgcctttagatgtattccaaagtgtttgtgaaacacttgattgactgttgacaccacttccaaaatgatggtgagctgtagttattaattttttaagcacaaatcaatattttgtacctctgtgaatttattttatctgacatttaattggaagtatcatattttaaaaaaatcttaatttgagaacccaaagcaaactactttagaatctgttgtgtttggctacagactgcttgattgtattgctctttcatgtttcttcaacaagttcagtagttttgctatatgaaactcttacatttctcctatgaagtaaaataaatcatctttgccatgaagaaatcgtgttctgtttcctttgttttctgtgttgaatatgaaattgaagaacatacctcctctctgtctgctgtagtttttagaaaatatatatagcctacatttccttaatttgaaaatacaaaatctggtatttatttcatttagaaactttcagattttggattgggattttttagattgggtattctgaactgatgaagttgatgtagataactaaaaacaaatccaaagtgtaaaacataagggggttcttgtaatgataactcttcaccagcctcctgaattctgccatcacgttagggccccaaaataacacagagagtcttatattaattacaatactgctggccaacaactagtatttcttatttgctagcccagtcttaattatcaaccataactactaatctatatattttataaagacttatcgaggacgccggccttatgcatcctgttttcctgggatcacatggcaactcctgtccttactacatttcccagaatcctcctcaactcctagccccacctaacttgctttcttattggccaacagtgctttatttatcaaccaataagacaaacatatacacaaaaggacttctcccatcaggttctcaagaatacttggtgcagacagaccaagctctaaaaatggctggtatgtttttagcagagtgaacaattacttgagatggagaaagaagagtttgtctcaggcacaagactaacctggaccccttggagagtgcagtggtggcttttcagtggatactgcttcctgctggtcagctgcattaagttactcttgtgtttgaatgctggactgcatccagagacagctgtcttcatcagttactgggttcatcagttggccacatccttcagacacgtatatgcaggtgtctgcagcccagaagacagggtcagatcacctggagctgtagttatagatgcctcaggcacccagcatggttacgggggacttaacttcttggtcatcaattggccatgtccttctagatttgctagaactagcatatgctaatttacttggtgtactgaactaatcttatctatccattgtttaccaaattccagctatgtgttctccagtggtggtaggctgtggagttacatgaacaaataggatggtctttgaagagtttaaaatgtacataagggactagggagatggctcagtggttaagagtgctgggtgtctcacaaccacctttaactacagctccaggtgatatgataccttctgggctccacaggcacttgcatacacatggcatacacacacacacacacacacacacacacacacacacaataataggtaagtgcatggatgtcacacttaggaacaaatcaagcttcctcttgtaatagtttgaccaagagaaagcacaaatatgaattccccatttctctcctggtgtcttccatctgtagttggtggtttctgacctgtctgtagcccttgtgttgtgtgtctgatctatccccattgcctgccctgtgtttcctgtgtgttaaacctgtcctagcaaagggctttgttctgtatttattgaccagcacaggaagcatagtatggggaagaaatgagggtttctttacagaactcttcaacaggtttacatgggaagaaaccactgacctcagctgacccacaagaacactcaaaacctcacacatgttatcaaccgatatcacttgcttctaacatttatggtgatattcgttttgtttaaggttactttctttttttttttttttaagatttatttatttatcatgtatacagtgcaggccagaagagggcaccagatccctttacagatggttgttagccaccaagtggttgctgggaattgaacgcaggacctctggaagaacagtcagtgctcttaacccctgagccatctctctagcccttaaggttactttcaacccactggctactttcagtaaacacacacacacacacacacacacacacacacacacacacacacacacactctactctggttcatggaagagtacataatttttaagagtaaagctaggttgctaggttgtaaaagctgattgcatggaaaatccaaagcatattaagagtggttacattgtgttggagcactggctgctcttgcagagattctgaggcagaggcacctgcctctgcctcgaaagtaccaggattaaaggtgtgcaccaccactgcctggcaaagcacatagtcttaaatggcctccaggtatattattaacttggcttccaagcaaccacatggcagcccttggcagataataagatctggtgccctctttgagtgtgtagtcagaatactgtgtacataataaataaacaaatcttaagaaaaaaagattggttacattgttttcttaaaggcagattaaacaggctaagcacacagtaggacagcaggtgaagcacatagtcgttttatttatttattttttcaagacaagatttctctgtgtaaaagcccttgctgtcctagagcttgctttgtagaccaggctggccttgaaccacagagatgcacctgcctctgccttgaaagtaccaggattaaaggtgtgcccaccactgcctggcaaagcacatagtcttaaatggcctccaggtatattattaacttggcttccaagtctaataaaagttcagtctctttgaaggcaagagatattttcagaaaacatcttgaaataggtaagtaggactgccatcacagtgaggtaagtgtgattgattggataagcatataccagagggcggtatacagagtggagtagtgtgaagcattctgaggcccgcatgaagtattttctaaggggaagaagcacccagatgatggctcgaggagttggattttgtgcagtggtccaggactgttgggtacaggtatcaaacaatctaaaccaggccctgatatagttggcagaatgcttgcctaatgtgctcagagccctgggttggagtgccagcactctggaatcccacttctctggcggtaggagcaggaagatcaggagttcagtgttatggttggcaacttagtgagttcaatgccaacctagactacaagagagcctacctaaaaaacaaaaattacaaagggaaaaaaagtgaaaagcatttcagaaggagtttgtaggaatatgagtcctccccttggactcacagggaagttgaggttgaccttgactttctgactgagattcacactgaatgttctccatttttctggctcagtagagaggaaattgtggtcactgaccatttctgatgctggatactgcaactatgtagacagaaataaactgtcaagcagtttctagaatggactgttgatcagcctggccaatcagatgcttgcccatgcctatcatcttaagatgaaaaaataaataaacaaataaggcagcattcacatttcaggagagaaggaatttggggttaagggagtaagaaaaggagtagttgtgacaacctcacaaaccatttgagctttactgtaaatgggtaataaatgagaccgtttagcagggtagggacgtggtcatgtgtatgctgggaattctgtggcaatgaagggtatgtggaaatgaggtcatggtgacaattgacttactgtaatagcctagaagacaaagctccaactgagacactggcagaatgcactgtacacctataatcctggcactagggagatggaggcaggaggatcagaatttaaaggtcattctcgcctacacagtgagctgagaccagcctgggttgcgattctgtctcaaaactgaatgagtgaatgaatgattaataaaaatctagaaggttagccagacattggtggcatatgcctttattcacagcactcgggaggcagaggcaggctgatctctgtgagttcgagaccagcctggtctacaagagctagttccaggacagcctccaaagccacatagaaaccctgtctcgaaaaacgaaaaacaaaacaaaaccaaaatctagaaggttgatagtactgtgccacggtatgccacttgcctaggatgcttgaagtcctaggttcaataccctgtgcccaacacaataaatacataaaataaaaaggacaggacttagaggatttggggtagctttcataatcattaggtggacccaggaaagaagtagatgtgacaaacacaagaacagcagcatccaagagaatattcacttgtcactactgctctcctcagcaccggtgacatctagggcctgtcatcaacatgtccccagagttgctgccaagtactaaagcctttaacattgtgctgcccaagagatccattcgcctgttaccatgtccctgcctgcataccctcacagttgacctataatttattgtattgaatatcatgagcacagaccagcagacgcgtgtatctgtgtagagaaaaatcgctattttaatatttgggattattgttttacttattttagagtgttgagggcagaagcccatgccttgctcgtggtaggcagactttcagcctcattcaccttcacccccctggccagcatacctgccaacatatttacatgactctctgtccacatttctagttcttccatctaaatatgtcaatatttgtcaagctggacacattttgctaaggaatcatgcgtgtgtcagcccagtgcatgtgacctgagagaccacagaactgagctgattgtcctgtgtttcctgtctgccttgatacctagagctctgctagctcttggccttgcttgtgtggtttctaatcttgtttgttatcactgggcatgcgtgtatgtgtactgcggagtggtatggtggtcagaggacaacagccctgtagaatcagtcagttttctccttccacatttatgagttccagtgaccaaagttaggcttccaggtttgcacagtacacctgctgagctataccactctcactgcctccagtctcctcattttattttattttttttgtttttcgagacagggtttctttgtgttgccctggctgtcctggaactcactctgtagaccaggctggtcttgaattcacagagatcctcctgcttctgcctcccgagtgctgggatcaaaggtgtgaaccaccacagccagcatctcttcattttagaaaagagactgacagcaactcttggggttattgtgacaattaaatgacttaatatatatgtcatatctattgttgcatagcaaatttcctagaaacttagttgataaaacaattatgtattgtccctcagttgtggtgggggagggatagcaagctgttcagctaggcattttcggtttgggtgtccaggacattatcacctgaagggtagtatggaaaggtaggacatctggggtgattgcagccattctctcaaggttggctttccttgtctccatgtggcagtttcaagtcaggcagacttcttgtactgtaactggaaaagtggctcaaggcaaatcttcatggtcctattgccacttctaagtaggcacaaatgtctctctgaagagcagttggaacagcttcctctggcttatgggggtaaactctatcagattgggaggccaggcataaacggtggccttttaacatttccacacggggactgtggatagttactgctcacagtggtctcatctgtgccatgctagagccaattaaaagccttgtgaaggggaaagctatgccatgcttctgcagagtgcacttataccaaggagtatgttaccttaatggttctttttttgttgttgttttttgagacagggtttctctgtgtaacagctctgactgtcacttgatctgtagattaggcctcaaactcacataaatctgcctacttctgccttctgagtgctgggactaaaggtgtgtgctaccaccgcctggcttctacacatatttctacacatattctctctgtcactgtctctctgtctctctatctctctatcactctctctctctctctctctctctctctctctctctctctctctctctctctgtctctctctctctccttttcctgccatcacccttaaggttcttctccatctgggcccccttttggtttcctgacccacatatattttaatgtgtatacacacacacatacacacacacttttaaatcaaggatcctcatgtgagagaagacatgaggtatttgtctttctgagtctggcttacttccctcagcataatatccctagttccacatattgtcttgtaaatgttattttacttaaaaaaagataggatgtatatatgatgtatgtatgtatgtatgtatgtatgtatgtatgtatgtaggtgttttgcctgcatgtatgttggtgtaccatgtgtatgtctgatgactgagaaggccagaagaggttgttgggtcccctgaaactggagtttcaggcacttgtgagctaccatgtgggtaccgggaattgaactgcaattgttttaaagaacagccagtgctcttaaccactgagccatccctatagcactacattctttttttttaaaaaaatacttattgtatccttcctaatgcttttcccttcctatttcatgtactctctttttgtgtgtgtgtgagccagcaggtgactgttgggagctgaacccaggtcttctgaaagaacagcaagtactcttagctgctgagccatccctccagcccctatgtagtcttttttaagcccactaagtgtagctattgctgccaatatgtgcataggcctctcaggggccacattcaaagaaaaccgattcccattcctctccatgcatcaattgccaatagtgcctcagctacagatggtttttgtgaacccttcttgaatctatgctggaattctgggtagcttgaccttaagtatgcaatcacagttactgtgagttcatgtgcatgacagcctgtggaacactgttgaagtagccctcctctggctctggcccttacagtcttccgcctcattttctgagatgccccctgaataccaaggggaggggttgtgatagagatgtcccatttagggtctgagtgctttacggttgaatagaattccatggccctgcatcacatttcctttatccatttaccttttgatggataaaacaaaacacctagtcagttggttgtggcacacacctgcacacctttaatcccagcactcaggaggcagaggcagaggccgatggatctctgtgagttcgaggccagcctggtctaaagagtgagttctgggacagccagtactacacagagaaaccctgtcttggaaaaaaaaaagaaatgaaaagaaggaaaaacaagcaaacaaacacttaagccatcccttcctcagggaggtctggtctgatgtgcttttgtatctgaagtctatgctatgtcgaaaaatgtacccaggttgatcttggcatattaaaagttagaattatctatcttgttgaaaatccttccaaatttagacttgcattagactctggacccatttgttaaaaagaaaaatgtgacacctaattagtgtgcatgagcacgctgggagagaggccaatccagcaaatgaattccagtaaagacacttttgcatagcttatgctgtaatagaaaactcagaaacagggctaagcctggcttgagacggatataaactgaggaagccatgcatggcaaaccagtaagcagcattccttaacagcctctgcttcagttcctaccttcactgccctcaaggatcaagagtgatggggatgtgtaagccaaaggaaccctttcctccccatgtccttttggttatagcaacagaaagcaaacttggacagtgtgtattgagtatgggcacacgtagaagtcagaggataacttttgggaattcaattctctatgatgtgtgttcctggaattgaactcagttctccaggcttggcagcaagcaccattactcatagccatcttgctgagaatatgtgacctgaagagtttgaagaccctggacaaacagcattgctagtggtttgtaaaccacttttcaggtgctgtctttttagcttacagctatgcgacctgtgactctgtagccttgtgatgctgtggccttgtggcactgtgccttctcacagtgggaggcacagtcaagggcttctgcttgcaggttcgtatcaaatacctcccctggctcttcgtggtgggaaggagaagcggtcttgttgattctgtttgtaatagccttgattgtaacagttcccacatgttgaggccagtatcctgcatttgattgccacacaatcatcctttctccccaaagcatttgacattcaaaaatcactccttaaatggttcctcttgactctaccaatttagctccaagggctttacaagaggaagtgtttcccgatgtgatggttgaatcacgctttgtgaaaatgagcaatttctgcccagcatgatgctctctggctttattgccttgggatttttctgggaacatgtgccttccgagagtttcattacaggaaaagcgaacacagatgcattctgctgttgacttctctgctaagctgagtgaggtagtagcatcccttccttttagaaggtgatggaggggggcatggcttacacacccaaaacctcaacactcagaaggctgagggagaacaagcaagtgtgaggctagcatgggctacatgataagaccctgtctcagaaggaaagggaatgagaataaactaatttcttcaccttcttacatgtatttcgacaaccagcaagggcctcttctgcttgttaaatctctgtgagatcccagtggatgttgttctcagcctcggccttcttgtctggagacaggtaccccacctgcctctgtaattctcaagattcttattctttattgggctgacctttattaattaaagtctctcagacacataaatggaatttcgttcttctgtaactcataaggtcatttcttacataaacacatcctaaggtgagcactttaatgtagagctgtctacatatccagtactcttcttctttaaattttttttaaagatttttatttattatgtgtacagtgttctgcctgcatccatccttggaggtcagaggagggcaccagatctcattacagatggttgtgagccatcatgtgggtgctgggaattgaactcatgacccctggaagagcaggcagtgctcttaacctctgagccatctctccagccccttataatttttaattttatatttcaaagcaggagctcactgagttgctcaggctaacctgaacacactctgtagtcaaggtaggtcttgaactcatgcacctccagcttcagcctctgcagcaagtgagacagaagaaccagagagggaggcaggcattgagctgtgcagtgtgggtctagacaactatttctgcccaggacagaggacagaggggtgggctctggagaggccctgctaacttctcacagatatgcccaccaaaactaatttattttcattggtgttttgcttgcatgtatgtttatgggagggtgtcggatcctggaattacagacacttgtgagctgtcatgtggctgctgggaattgaacctgggtcctctggaagagctgtcagcactcttagccactgagccatctctccaggcccagctggagagaactttagctttctggccctgcttctctcttccctgtcttcacggcctcagatcatctcacttcctctttggttcagttttgagcttgtggctagcagctgcctgatggaggaggtggctctggcctccagctggtgtctatttttgcactgagctgccttctcactcctgacctctacaaggcctctttaatcattagttttgaaagaccaaggagctttcagatggcctatgaaaatgttgatgactcagaagaaaacaaaaaggattgaccccaaaatatgaatatgaaaataaagtgaatataagaaactaaggatttaactaaatatctataagctaaaattcacactgacattattaattgataaatgttagtatacccttaggatacagtatgttgggaatatgtagcttagtgatagaccacaagaaagctagtattcatgaaaatagtgattatatttagagacagagaatggcacattacattatcccttttcaaaagattgacaagtatccatcgtgcatgctaagaaactgactacaattttttttttcgagacagggtttctctgtgtagctttggagcctatcctggcactcgctctggagaccaggctggtcttgatctcacagagatccacctgtctgcctcacaagtgctgggattaaggcgtgcaccaccaacgcccagctgaaactgactacaaatgaaaaggtttacttgtaactaaattattttagaggcaaaagtattttaaaagtcaggcttgcatggcaaatgcctttacccatgccagcccacagaggcaaataaataaataaaattttaagaaaagatttataatagcatgggtgcatgataataaagttagatccttcagcccaagaatgtcaaaatctatttatttagctttttttaagtatcttttttttttttttttgagacaggattctctgtgtaaaagctctagctgtcctggaactagctctgtagactaggctggcctcaaattcacagagatctgcctgcctctgtttcccaagtgctgggattaaaggtaagtgttaccactgtccggtgatttttaatttttcaattgcttgttgccaatgtatggaagtagaattggctttagcattttgatacagtaccaaggagctaaatggaacatttttttaaaaaaaattcatttatttgtctattttatgtatatgaatgctttgttttcatccataccagaagagggcatcagatttcattacagatggctgtgagccaccatgcggttgctgggaattgaactcaggacctctggaagagcagccagtcagtgctgctcttaaccgctgagccatctctccagctcctgaaacatttattaattctgaaaatttacttgtccattctttatggtactgtatattagtaaccatataatttacaagtattaatagctttaacatccttcccaattcccatacatttgatatttgtatttttgaaaaagggtcttcctatatagtccaggctaacctcaatctcccagtccttctgcctcagtttcctgaatgctggcattacagctctgtgccaccatgtgtatgcagcttcctatgtttttttaattttttttaattttttttaaattttttttttgagacagggtttctctgtgtagccctggttgtcctggaagtcactatgtagactaggctagccttgaactcatagagctcctcctgtctctgctgagattaaaggtgtgcaccaccatgcccagcttcctacgcattttttaaaactcttatcttgtttctttgtaataattttatccctcatcatgattattattgtgtatgtatggtgtgtatgtgtgtgtacatatgccagggtgtgtggaggccagatgtgtttatggtgtgtgtgtgtgtgtgtgtgtgtgtgtatgtttgtgtgtctgtggacatgctcctgggtgagcatgtggaggtcggatgtgtgtatggtgtgtgtgtgagtgtgtgtgtgtgtatatggtgtttgtgtgtgaatgtgtgtgtgtgtgaatgtatgtgtgtgtgtgagtgtgtgagagtgtgtgtgtgtgtgtgtgtgtgtgtgtgtgtgtgtgtctgtggacatgcaccagggtgagtctgtggcagtcagaggacagctttgcactgaaggttgaaagagagagctgactccacaaggctgtcctcctaacattgctttattgtcctagaccagatgtttaccacagtagttcatagaataatggcccagcacttcccactacctagtacttccattcccatctcaattgctctcctgatgtatcgatcgattgattgattaatcgattgattgatttttgccactttggctcccctgattacctcttgctgggagtcatccaaccactctgtgtgtctgcattcacactcattattcctgctgtgcactacagtttaggcccgtgtttccttcactaaagaacaatcactacaagtgaagattcccaggaaagacccattcatggtttcagtcagtatcgagtgagaatctccagggttttaggcaccatacaaagagctaatgaattctagtgagcaagcaaatgctgtagctcagcgtttcatgtatcacagcagcagaaggcgtccagctaggaataagggaaaacaaactggcaataatggagtgggccagtggaggatacctatgtcctggaaggcatctctcatgaggacatggtactgagtgcagagggtggggagggagaagctgtgtggagaacaacactgggggagatgagcaggtgtcgtggcctgtcaaatatgagataatgaaggcaggagcatagtgagaggaacagggtgtgtgtgtggggaaggtaagagtagagatgtttatcatctcagaaaatctttcttggccaaaggcatggaacatagatgactctcttcctcctccttctcctcctcatttatttattttttattcagatgtgtgtataccacacacacacacacacacacacacacacacacacacacacacggcatgtgtgtgtgtgtgtatatgtgtgtgtgtgtgtgtgtgtgtgtgtgtgaaagccagaaaaaggtgtcaggtcccttggagctggagttacaggcatttgtgaactgcctgatgtgggtgctgggaattgaactcaggccctctggaagagcagtaaatgctcctaaccactgagccatctctccagtcccctagaacctggatgttttgtctgcatgctatgaatagctctacctttgaggacagatctattaaccaaactcgtaagaccaatgttcagaaccagaattccagtgtagtcacagacagtgaaaaatgtgactgctacagggaccaaggagctgggcaaacacatctaacactatcccccaaaggcagggtgacagccagagagcagcctaatgagcatgaatcagatcgtagggttctctgatatcagtgaaacatttaatgaaacctgactcatccatttcacaatagggattagatgccaccaggcccaagaaacttaagaaaggcaattggtcagatagaattatgacaggtaatgtttgcctcaatcaagttcagtgatttttgcacttgatatgtttatagttaataacctttgggagtcttaaaattgttttatggttttttaagttccagatttgaaaacataaaatcaggcattataatataatgaactcccttgtgcccatctctcagcttccacatatggccagtctggttttatctatgcctcagctacttctcccactgtattatcttaaagaaagttccaatcctgtccttcttgttctctgatgacatcagatatcgctgcttggatcttaatagggccccagggagcagtttcaagacagtcaccaccatcatttctgtttacttttaatcttttgttaattacttgggaacactaccatgaacatcaattattggactccatagcaaggcagagctctgggtttttcgttttttttttgggggggggggctggggtcccgcccagacaactccatgcagctgtgggctctctgagactagagattgagaggcgctacacttaacaaacccttatgtaaagttattgactctactgaagttggagagtgaactcaggaatgttgtcagtgattgataaggtacagaggtggtggctgaggtgctcagaacaatcgtggagacttctaaaaaaccaactgcatttccatgatgctccccctcccctccttttgctggattttatttctcctgatcagaggctctgagtctcatatctgatgtttcatggtggccgtgtcaagggcaagtgcatgatatttgaaatagtgattgattgctgtcagttttctgactgtatgccacattctgtcggtgctatagccattacctatctaagagttcttgtgcacacacatgtacacatacataagcatatgttgatagatgcacataggctgaatgtaattttaatatgtcatgtggcattcataatactataaatatataagcaagtctcttttaggaatttttagttgctaaggggtggctgctactccctctagtatatattccactcaaatgacagactggaatactgtttttgtttttatttaaagattttatttatgtatacagtgttctgtctgcatgtatgcctgcacgacagaagagggcatcagatctcattatagatggttaggagcgaccatgtggttgctgggaattgaactcaggacctctggaagagcagctagtgcttttaacctttgagtcatctctccagtccctattttttatttttatttatttatttgagacagggtctatgtatccctggctgtactagaactcacttgtttttattgtttgtgatgtctgcgtgcgtgcgtgcgtgcgtgcgtgcgtacgtgcgtgcgtgcgtgcgtgtgtgtgttgctggggatgaaatccagggcctcacacatgttgagcacttgtcctggcactcagctataccctaaccccggcagacttctttctcctcttcctctacttttggttttttgagaaaaggtcttatgtaccgaatactagccttgaactcaagagtgtagcccaggatgatcttgaattgctgattttctagcctctgcttcccaagtggtacttgcctggcctttgtgtttcttctcaaggtacagcagaagtaagtcattgttttgtcttattgccagaaacatgagaataaatcctcaccacaagggggagctaagccacagagaaaagctgagggtgaaggctattcttgcgagagtagtcatcaggtgggagacacttccactaactgtagttttcagaccccagccacagggcttgctcttcactctcttcccagtgacttatttgtggttctggagatcaaacccaggacctaacagttgatgtgagtgcgctgtccctgagctacatttccagtcctgcggctcagctttgtcttgatggacagcccatggctggcgctggaggctctggctggccagggcactcatttcctacaactgcaaaccctaaactggtctttcacatgcaaatcaacacacccagggcctacaacttgagtcatctccacacagtcagaggatacctccccttgctctcatcccagagtcagggctccgaggagggtattggataagatcactctctgccttattctagggacagggtttctcactgaacctggagctggtctggtggccaccaagcccaaagtaatcctcttgtctccaccctgtccctgctccttgccgaacactgagatcagcattgaggtagaggccacaccagttttatgtgggtggtagggatctgaactccggtgatcttgtttgtcacctattaagccatttccctggccccaaatctgcattttaaaagcctaaccctacagttcataactgttactgttaatctttaagacacacctcaaattctgcctctcttcaacattacttcctactactacctgggcctccattcctactccagtcttgacaccagtgctggagcaaaagtgttgcacataggaggaaggtctcaggaaaagtgcagccatggcttcaagagcatttctgaggcacatatagtgatacatgcttgtaatcccagaacctgggaggcaggaggctcgcccacagtttgaggccactctgagcaacatcatcagaccctgactcaaaactaaaaaggaggctggcaagacggctcagtgggtcaaggtacttgttgccaatcctgacagcctgttcaatccctggagaggttgattggaggagaagactaactccttcaagttgtcctctgacctccacacacatgcacaggccatggcgcagacgtgcttgcctcatctctaccccccagtaaataagtaagtgtaatttaaaatattttcccaacaagcaaacaaaacaagactatttctggaaactgtaatacactcagttgaacaaaattggttttcaaagacaaacatagctttactctattgggtgtttttctgggtactctttcatctgtgacaggacctccaggtcctttggaacacaattacctgctgctcactgggcatctgtggtgttttgaaagaaaatgaccatcatagggagtggcgctaatgggaagtgtggccttgtggaggaagtgtgtcactgtggaggtgggctttgagatctcctatgctcaagctacaaccagtgagacagaccacttcctgttgcctgtgagtcaagatgtaagactctcaagtacttctccagcaccatgtctgcctgcatgctgccatgtcccaccatgattatcattgactgaacctctgaactgtaagtgagccactgcagtgaaatgctttcctttataagagttgccacagttctattcacagcaatagaaaccctaactcccactcctgctcattcatctctgctgtcagctttgactcctgaggttcctgcaagtccacacacacttatttcaggatcggggtctggatgtctctccccagcctgggatagtgattcatgatttgtctttaccctcaggaagtaagggtttccctgactcccccttacaaggctcaccctttccccaaactcttcattccttctcctttgcccaggtctacccacctgtgcacatttgcttctcctggcttgtcaatgacctgtttcccacttcctgtggactcgggcctactctgtgtatagctgaagagaagttggatggacaattagagaccatggttttatattctgccattgattacttaaaagtacgccctacacacacaggaagatacttatctctgagtacctgtcatcaagggggtcctagtcagctgcagctgtcaacctgatggagtctagagtcaaggctcttatagaaagaaacagggagtgatgattttttttttaaactaaaattttattattactggcaggggttgtctgtaccatggaatacatgtggaggtcagaggacaacttgtagaagttagttgttttctttctaccatgagggtcccagggattgaactcaggccaccatgcttggtggcaagcacttttacctgctgagccatctaaatcagtcctcataataagattttattttaaagattcattttatttttaattatgtgtataagtgtgtgtctatgtgagattatgcacacatgagtgcatgagcctgcagaggccagaagaggccgtcatgacaatccctggagttagagttataggcaggtgtgagccaccggacacggttgctggcaattccagtcctctggaagagcagtgtgtggtattttcatttgtttggttttggtttttcaagacagggtttctctgtgtagccctggctggtcccaagctcacagagatctatctgcctctgcttccttaatgctgggacagggtcatctctgtggaatcctggctgtcctggaattctctctgtagaccaggctggtctcgaactcagagatctacatgcttttgcctcccaagtgctgggacttaaggcctgggctaccacctggcttcagtgagtgatcttaatggaatgagtaccactgagtcatgtctccatcactgcgctaggatttctaaacagattccaatgtaaatttcatttagtaatttaataggtaggcacaccatagacatttttgctgtttttcttccctagacaaccaaaaaaaaaaaaaaaaagacaacagaggattgtgtattttgtttaatacttgcattgtttctatagcgcaattatagcaatctttaagtttacttttcattacaaatatttgtcaagttttgtttcagaaacagttttcctactttcttgcacatgcgcccagacacactacaaaaaattcattcataacacagtaagggcaaacattactcatgtaaacatcttccattaatttcccataattaaaaaaatcatagaattatagatattgaataaggctcatagatttagtttaaattccacaaaagaccaaagatgggtggttttttttttgtttttttttttttttttgaactgtgatatggttgacttttggttacaatcaaggccggaaagcataacccctggcttccattctgtaaacatacctcacaacccaataaatgtatttttggatggaaagagaacatagaaaacccaggaggaaaaacatttggagaagggagctacaaatcatggatataacttggtaactttcttatgcaaccaccaggcatgacatacatagtccctgtagtatcaagggtaattatggaaaccaagtagaggagtaggatgcattggctcagtgttcatattgctagtgtacacagtgaaaatttgtcagattattgtttcattatatccagggccaaaggcgggttggggaacgcactcgagtggcatatcactgttaaaggattttttgttttgtcttgttttccagtagcatcagaagagttgggaggcatgtcttaggtacatgaatgaatggtcttcatattaaaatgacacttaacaactgcgcataaagtcacagacaggaatcaagggtttccattatccgcggaagtctccctctctggtgaagttgggtccagagctgagacaggatacggactgtgctgagaatggcccccccaccagcggctgcccgccctctctgggagagggagggcagaaggcaaaaagcattggtaaatctgtgaagtcccaccccggggtctggaccccaactccactgagggtagcctccctgacattgtgactaggcagttaggggtggcgagagaaggtggccgggaaacccagttctgaggtccacacggccatgtctggtttctgattctgttgccctgcaaagaaattgttgtgctccgataactgcaccgttgtctctaatgcctcgattcgctctcaggcccctgggaggcctgtagggaatcactaaaaggtaaacacacctccattagcaccgaacttaccaccagaaagcggctgaggcactggggaagcctacctcacatcagacaccaccccaccaggaggtggtcgccaatcagaggactttgtaggcttttgatttctaaaaatgaaaattgatctgcattatatctcaatagactcagataattctcaccaaaaattttgtcatgtgtttaaatagcactggaataattcaacttcatttaaatatattcattctaccatgaaaatatttcatacaaacatctatttacatacaaacacattaaaatttgtgaaaagggtttccacccctgtggctgtatggcttgaaatagtttcattgctttgaatatgtatgcacacgtttggcaaataaaacttttaaaatttagtatttttgaaaacaaccaaaaaaaaaaaaaaaaaacccaaaccccaaaacaaacaaaaacccctcaaaaatctccacaagaaaccctcaaaaaaacaaaaacaaaacaaaaccccctgacaccaaggcttaacatttctgaatggaaaaaaaaatccaaggtgtgtgttggggaatcaatcaaggtacctcaagtacctgaaaattgaatatattttgtgaacctttgatctgcagcaaataaacatcacaactatccatcttgcaacatagttttgcttgtttgtctaaaacaaaagatgtctggattctaaatcactactctgaagacagaacttgaggtggctgttggagaacaaataaaatccagaattttttactttcttggaagattttaagtgcatttttgtaatgagaaatttatattttttaaatctattaagtgaaggttaataaaagtgccacatactgtctcactaagacaaacttttaattaggtattcataattgatctcccctgcagtattagggatgtaatccagggcctctagttgctaggcaaatgttggaccactgagctatatctatacagctcaatgcaattttaattgtcacaattaaatgctgtatatggccttgtcagtttgcatgcttgtgtgtgtgtgcgtgtgtgtgtatgttgtgataaggaaaaagtttttcaagtgtgataaatctcaaagggtaatgaatctgaactctagttccagtcaggttcaaagaggtcttgacaaaatatttccttcttagttgctaggggagatctgggatcaagcaggttaaaataagaataggtactaagaaactcaagtcctccccacctgttacgttttagcctcattattcttttgtgtcctaaattcaatccttacatctgcttgttagttcgaatggatgccccactaggggacatgctctgtagactagttcctattcctaagtctaacacaaggtaatagttcatcatagaaaagatgctaatgatggatcaagtcatgcagggttgaactgagatagctctgaatgaatcccttggagaccatggcgtcagggagtgcacaggctccagctgtttggaagacagcagaagggtaattcttttttccctaccgcgtagaatctcaatcatgtctgtttgtgattttgatcctgatggaagaccagatttacctgcttcctattttcttttacaacagatgtgaaatagaaggtgaattctgaggcttttccactttgcgccaaacaaggaacaaacaaaccccaagccccctcagtagttaattctctaagcaacctggaccctgctgacttctctacctccacaatgactcttcgtcccctttaacagttgcaacttgagacaaagccggatgtcttggggagggggcaaaaagaatgactggaatgagcacgaaggcagtgtagcaagagaggagaggaattcaagacataaagaggcagagcaatctgctgggctgccattctgcagactccaagggttctcacatagcagaagtaagagagctgaaagacaaaggaaacatacagggaaaaggaaggcaggctcagctgtgtgaactgtttcctgtgatttgtctaagggtcacgtacacagcactgggcttgaagcccagactgtcttcctccagtatggaatgtgaaacgtagattagctagctcgccagccacagttcttcaatcctgctatatatttttaaaaaagattttttttgtgtgtgtgggttcatgcacgccatactctgtgtggcagaggacagctttcaggagttggcttcctccttctgctatggaggtcgcagagatgaaactcgatcatagggttggcaacaagtacctttacctgctaaactattttgctgaccctcaagccaccaaaatttgtttttgagttccatttgaatgagattgctagagtagccctttaagatacaagttgagcccccactgcagctgagactaggttctgtctccaggtgtgggcacaccacccaaggtggggcctgacctctctccctctgcctcatctctcaacctcgtccaacaacctgactgatggagctgtaggaagccatctttttcccgaaggcagccaactctctttggacacatttacacgaaagcacctctcagaattcaaatccacagaccccatccttctgtcacagtttactaaacagtctctttctacagaatagaagcaatcctatcctggttgacttgtagtttaaaaatgattcagtcattttgcaggagacctccttagaagttctgaggatatttctcctgagtgaattatcttcttaagctttcaaacagtgatgtgaccagctctcctggaaagtaccaccacctaagtgcagagactgaagctgggtgtgtcaggaagcttgagagcccagggtgtggctatcatagctgagggcagagtcctccattctggggctgtttgatggggatcatttgggaaagctgttgttaagagcaatgtgcaactgacaaaaagagcaaactgccctctacctatcccctctctccatttctacctgctcctggcaagcatctctatgaactttgagctccctcaaaagcctaaacccacccaggcctctcaggtagcactgttgacagtgacaggcttcagcaactgttgtccctaggctttctggtgatggagcgacgccttgggggaggtgtcccccaaccccagaattcattcagagcaatccagttaggtaatagatctaatgtgctaaactaaaatagtgggcttttctctgtattcctgtggctgtgattacatatggcttacgaggtggcaatatgctattattgatagaaactgcacaggtgtgaacttgtggcttacagagcctggaagcagttaagtgcttggagatcactgtggtgaaaagcttagctacagatctgatttacacctagtaatcagcatgtctgtcttcctggcactgattttaaagagaattctgcattctgttttggaatgcacattgactatcatattttgaattccatgagctgtgtcacaagccagactgcactaggttatgtacaatgaatgggtaccagaggagaaaaaattgccagcactactgaatatactgcaaaattgccacaatgactgcttagaaatactaattttcctctcttcttcctgaaagtatatcttacaactcttttgtaacttaatgcaaacaaagtaaattcatttcttctcacatctgaaagcaaagatatctttgtttacatgcgagaataataagtctataacaacagtctggccctatgagccagttctttatatcaggacataagaatgaaatgatagagaaagaaccagagagacctgtacactgctatgaatgcaaaatccatttggaagctttctcttgtaaaggatagctaagatagggagtgaggctaaagaaaagactcaaaagcctgggctttgattcactagaagagtaacaacaaaaacaaagccattctattgcaagatacagatcaaaggttaaaaggcaaatgaccctacatttatataaagatgtaataatccttccaaccctgcaggtggcaacatgcaagggtgatcgaacaccatttgcaatagccatagaaaaaacatcattaaaaaaaaaaaccttcgatgaaaaatgactgaagaatcccatttccctttttcagcctaatcatttggtatctctgaacgtggtccagatttagacttcaatcatcaaagaacatcatgctgtctacagttcgacagtacctctcagtagggcgttgctgcaaggctagctaattttaaatctggtatgagtaatacagtcaaacctagttagtacgcgagaaagtcgttgctaacgcagggtgagaggatgtgatgtcacagcatgaacagtccctggttgtcccattgtcagataaatgtagtgcatagatccaagtttctattccaggtctgtggaccccagggccaggtctttcacttttgctgggtggcctggaaggccttcagctccacctggtaccactcaggggcttcaggaccactcttccctggggggctgtggtcatagccataagcaacggtcagctcttcctcagcctccacagcttgcagggtgcggatgcacttgataggcccaaaacgggggtggacaaacctaagcatcaagatgagaaaggtcattacagtgccaacacaggacctcaggggcgaaggggaacatctcacccatatacacaggcatcactcctgtgttcttagagtatgggtaaagctctatcagcttcagctggagcttgtaagaggagtgtctcagccctagccccagatctgctgggttagaacactccaggcaggctggagatgtagctcagttggtagagcattgacttagcatgcatgggatcctgggctctctcagtatttcataaaccaggcatggtggtgtatatgttaggaggtgggctaggagaatcagaaatgcaggttatccttggtttcataatgagtttgaagccaacctcggatatataatattctgttttaaattccactatgtgggtcctggggatcaaactcaggtcttcaggtttggtgaatgcctttacctgtggaggcattttgctagaccgtgtctgcatttagatccccatgacgaatgtaagacagaggacacatcaaatgggaaggagccagctttaaaccatatcggtctctgtggcctgatggggctaagcatttggctgtcttctctgtttgtggaagtaagtgtcctgaccatgcactcaggaattcttggttattgtggcttttggctgaggatatagctagtggtagagcacttgcctggcatgtaaaaagccctgattttgattgctagcaccacaggatcacaattctgtatgtatgtacttatacatgcatgtatgtgtctgtctgtctgtctgtatatctatctatctatctatctatctatctatctatctatctatctatctatctatcttctatctgtgtatctatctataaacaggcatggtagttcgaatgaaaatggcccccataggctcacagggagtggcattactgggagatgtggccttgttggagaaagtacatcagtggggtttcagaagcccaagccaggtccagtgtcattctttttttctgctgcctgtgatatgaatgtagaactctcagctacctctccagcaccatgtctgcctgcatgctgccatgctttctgccatgatgacaaggaactaaacctctgatcggtaagccagctccagtgaaatgttttcctttgtaggagttgctgtggtcatggtgtctcttcacagcaatagaaaccctaactaagacagaagtgtattactgtgtagctctggcttgctgggaactcactaggtaaaccaggcttgctttgaacacagagagattcacctgcctctgcctcctgagggctaagattaaagacctgagctaccatgccagggaattttgtctttaagctgacatgcttcattataatttgcatcatatgatttcagtatgaaaatgaaataatgctcctgaaatggagctttgattaactttctggaacatccactggcgtgagggaggggaatctgatgttgaaattttgggcttaagacttcttttccaatgttcttatagctttattctcatgttcattgtcacctgtcatcttttcattttgatgtgttttttgttgttgtttatttttaaattaaattaaaaattttttttcaagacagggtttctctgtgtgaccagtctggcctcaaactcaagatcctcctgcctctgcctcccagcactgggattaaggaactcattctcctcctgcctcaggagctggggttacaggtgggcataaccacacccagcacattattagtttgggtagacagaataaaaagaaagaacttggtttcagatgttaaggcttgcccagggcagtcagtgcacactgcactgggccactttccttccagagctgaggcctgactgggaattcctgggaggacagactgagacaaaacatgtaaggcatccagagtagggctagggtacatggacagagtatgagtttagcagtgtgaggccctgggttcaatctctaaccctcgtggaaggaagaagagaaggaagggatgaggggacggagggagagcaggacccagaaagaatgatcagaggccttggctacagaagtagcaatgaccccaaacctgtgggaccttagttgacatgctaccatatttacaggtagggaagtacttgtgttattgtccactgggcatttcatgccagacttccgtgcaagcagcataaagaagtgctgtttcacttacattaatgcatatactaatgccagtgacttgagaaaacacacagatgataggaacttggatctgaagtatgcatttggttattattcaaggagtcactaccccatataagtgagttttggccatgctgggcttgcaaaacaaatactaacaacaaaagaaagaaaacagccaggcagtggaggcatatgcctttaatcccagcacccaggaggcaggatctatgagtttgaggccagcctggcctacaaagtgagttctaggacagtcagggctacacagagaaaccctgtctcggaccccccccccccaacaaacaaacaagtaggcaagtaaacaaccaaaaaaccctactaccaccaccaacaaagaaaacaaacagaaaaatcaaaagtaaagcctgctgagcagaaactgattttgaacaacaaaaacttctcttgtttccagttctctattgcgtttggaagaagagctgtccttgcagtgaagtcacagacaggcttgattcaaatgaagggtctgagtggtatttagggtggttagttacaggcattaagagaccattgtttatgccagcacagctgagaatgagtgtcagccaaatgcacactagctgtgaaagccccgaagctttcacagtgtcagtctcatttcacatgacacatgtcctttgccatttcagccagccctttagaggcagctggagcaccaatacttattattggctgccaaggagagctagtcattgccaggaccatttccagggcatctcaaggacgagtctcaggacatttcccagcaagctccagatcctggcaaggtctcagatgaaatgcccagagtgtgatcttgcacagcagaggactgaagctatggcacgaagcagggaagagatgctctatgaccatgctacgctgctatatctattgtgtgtgtgtgtgtgtgtgtgtgtgtctaggctaagggccaacttcaggtgtggtcctcaaacagcatccaccttgttttggggcctgggtctctcattggcctggaacttcctgattagtggcccaggctttcgttctgtttctgcttcctcagtgctcagattctaagtgcccttccccacattcagctttttatataggtgctgggtggggactgaacgcaagtcttcatgctggtgcagcaaacacttggatgataactcctccttcccaccccagtcctgcaatgcgatctttaaatgagaaaaaaaaagggcaaataaggacagcagtaaaacatatttctatgatagttctgcttttgaaatcaccttttcatctcaaagctagaaagcaggctgtttagatcttgaaccttagacgacaaagctgaggctcatggcaaatgggccacttttcccatgccctcctgggtcctggggcccctaggcatagatccatccagtcactagcatcctacttacatgtcatagatgcagtttggagtaaaggagtgattcgccttgtgtcccaaggaggcacagtacttagatacgtggttatagggctcaggcacatcaatgactgtctcctcatcaagggagagagtgttcccattcagggcccaatctctgctgtcgacctgcagaacacagggaagtggtgctagagaaggcctttctcacagaagctcaatgcacagcagaggcacaaactcatttatcttagcacttcatagtttgagcactgcagacatgaaagccagccaagacatcttcccacacaaggatggcgcaaccagacagctcaacttactgcttattgtattttcctcattttatatagaagaaaaggattttgattctttacaaagacacacaaaaatatcagataaacttgaactaaaaataaatgaagaagagactgttgagatgtctcagtgcgttcaggcgctgactaccaagacagactgtctgagtgttcagtccacagaattcacatggtcagaggagagaactgactcctggaagttgtcctctgacctccactcttgatcttccaaataaataaatgttttattccctgagacagagtttctttgtgtagtcctggctgccttggaactccctctgtagaaacaggctggcctggaacttggagttctgcttgtctctgcctcctgagtgttaggactaaaggcatgcaccactgcctaaccatcatgtttttcttttttttttttcttttttttttttttttagttttttagtttttcgaggcagggtttctctgtggctttggaggctgtcctggaactagctcttgtagaccaggctggtctcgaactcacagagatccacctgcctctgcctcccaagtgctgggattaaaggtgtacaccaacaactcccagttccatcagtgtatttaaaattttttctataaaaagtcccacacctctgcttcactggaggagtcagggtgagtaggaggcagtctccaagccagcgtgctatgagtcctacctatgctaggattcatggtctatagcataaccaattggcttcttcaggttggacattgggaggtcagcagaatagcctaatggctcttataaaaaggatcaagtttttgtagaacttgtaaatgtagcaggcatgttcaaccttctgtcagtgagacacaactgtcatctacaattcatgtttgtgagccaaacaatcgagtttaaaaataaaacaaaacaatctctcttaagttttcaataaacttacaactttgtgttaggctatgtctgtagacatccttggccccatgtagcctgtggttcagaggatggacacttctagataaatcaacccttcttcctatacattacatttatgcatgacagtcaataaaatgggtagctgccacaggcagcagtatcaaacatgagaaagttccccttaggtctcattattcccaagctatcatgtaaccacataactgataggctgtgtggagtgttgtttgctttaagctgtactaggtatatagcagaatctaaacctcactgtgtgcaaagggtgtaggaatcacacagcagcaaatgctagccttacttgaactgtccatcttattgcatttgtgatcttgggcaaattgcttaatctctttaggttttcattttctcatctgcaaaatgtatgaatgaagaagcacggtttaatatttaaaagtctagaatgcttccaaattcaaaacttttcgaggctgatatacgattggaagaagccgcacctgaccccatatgacaggtcacaggcaaaatgcagacacaataaaaatatagactaattgcctcccagctatgtacacaggaaacactaaatttcatttagactatggtcccattcctaagatgattataaaaatgcaagcatctaaaaacaccagattgctaacatttttggttccaagcatttcagttaaggggcactccacctgtaatgcacccttatcccaaatccacccttctctgctgagtgtcttgggccttctggagggctggtgaagtacggccacctgtgtggatgccatctgctccacctgagcattttgttgtctttcccctgcccagttgctttgaatgtgtgactaattggaacatttcgtggaacgttctcttattatccacaggaataagtgacaatgtggagacctgatgtgagatatcagcaatgagcctgagccctgtatatttattaaaagtgtgaccgtgattgtgctgggggtgcagactggcccttagacagacaccgaggagtcagctacaggatgaggatgagccatttatgaagctctaaaatatgctaaagactttgtcttaaaggcgagaggtggtgcatgtgccacaaatacatttggggaggccagagagcaacctcaatgtccttacccagggttccccatgtttgtttctgcctttagttaaaccctttagtcagctaggtcgacgttcacctctttccacttacctcttggtgtgtaattcggactccattataaaaagacattacagtattgggtcccactgctaccttggaaaatagtccttctccagcactggagatgagagagtcggcaacataaaccctaaaataaataaataaataaataataaatgaaatgtgagtttcccagtgtgatgtgacagtgttgatgtcaatcactacaattccattatggttactaaatcccaaaggacagttcccagttgttcaacaaagaaggaagcaagggtaagaaattaaaccacagtatgttggtaacagtcatggaagaaataacttttatctctttaagagttgtattcaaaacgacctctaccacctcctttagctcaggtatctggctcagggtatctgcctcagacttgctctgcagtcaacgacaatcaggaacttggtcatcttttttttttttttttttttgagagagggtttctgtgtgtagccctgactgttctggaactctctctgtagaacaggatggcctcaaactcacagcatctgcctcctgcctctgtctcccgagtgtgggattaaaggtgtgagtcactgggcctggcaacaaccacctggtgataactagggacttctgaacctgcccagttttctgtggtgttggagctcaaacttaggactctatgaatgctaagtatgcattctatcaactgagctccagccccaggcctcaaatgtcttttccagggttggagagatggctgttcttccagaggatttgggtttgattcccagtacctacatggcatcccatatccatctgcaacttcagttccagggctcttttttgaaaaagatttttatttatttatttatttatttatttattatgtataaaacattctacttttgcacaccagaagagagcaccagatctcataatggatggttgtgagccaccatgtggttgctgggaattgaactcaggacctctggaagagcagccagtgctcttaacctctgagccatctctctagccctccagggatcttatagctggctcttatgggggcatttccttaattgaggttccttcatctctgatgactctagcctgtgtcaaggtgacatacaaaccagccagcacagtacttgatattcgttttgaaaaggaagctaatgtttatagttaatgacaagaaaacattttccaaagtttattaacactgtgctcaaatttctcagatgacagaggaagactattgtttggttaaagccaagatgtttatacaaaaaaaaaatgacagttaatgagatatatccaacaagtatttctcaacaaaggggttaaagtagaggtcagttaactacaggtcaaatctgactgctgcccatttttgttgataaagttttattgaggcacagctgccttccccagtttgtttaagactgtgtcaaaggcagaggctgagtctgtacaatagataatacagggtctgtaagctcctgaattgttacttggtgttcttccatagaaaaagtttcctaaacattgctttataagaaaagcatcctgtcaggcagtagtggcacatgcctttaatcctagcattcaggaggcagaggcaggtggatcactgtgagtttgaggccatcctggtctacagagctagttctgtagctctggtgaatttttgcctgtcttgaaacacccgcccccccccaaaaaaaagaaagaaagaaaagcatccttggctgtggaatggaggtaataagagcttatgttctaccaacaaatctttaatctcttcgtttctttgtgcactgtgatggatggccctgttaggaggtgagcatctgtaattttggcttattttatggactggaaatctgaattattgcttttaattctgcttgctcctctctagtgacagaatgatacatgtcacccctttgccaggtgacctcatgacacttctttaggtgcaggtggggcatacatccccaccctgctgactctgctagctggacatggaagagggccttgctgctgggtctcaggtgttgagagacatggtgagtttttgccagtctctgccagtttctattgtctccaggagaagaatatatcctgggaattgttgttcctttagccagagtcttggaatgaagagatgtgaaacagacctgaacccaacttgaatcctggagcccagcctaatccggctgagcctggtgaaaaccaagtaaagatggctgaacctaagcctacccacagaaccatgagtataacaaaacaccgacctcggtaaacagctaagcagtttcagagtattgctatacaggatttcacaacagactagattgatagatttcagttgggcttgtggtgttttggggcgaacacagaagccagtctacacccactggccctgggccagaacctctcgttaaaaatgaggacattctctccctgcctgtggcactgtgggatcagtgctgtcatttagaccaggaagaagcttgtttctcagatgggagcagaaagtaaacaagaggtaagccacgcccccgggggctgtccttactcagccaaccagtcgaaggagaattctgggcacttagaattcacgttagagggcagccatcctcataggttaggtatagaaaggacagacctgacatggagggatgcttttacgcttagaaaggacagacctgacatggagggatgcttttacgcttgccattactgcctttgcttatatcctgtcttcccttatgaataaagaagttgcttagtgttccaaaggtcaggctacagagaaaaggagttgtgctggaggtgtaggctagacttgaaagagcatgggttgctcccctagaagactgtctcatcaagaaccctgagagggcctggaagattgcagtgggcaaaagcgcctgcttgtaagattgagccttttccacatggtggaaggaaaaaacagttttaaaagttgttctctgatttctacctgcatgcttctccaacttcccagagtcccgagaaaggctgtctgacccaaagctttacctcgagaggtcattctaggacgagagacggaccttcttgctaacttagaaaccttctgtggacagcctctatataagaatataattagtcttcctcagaatacacaaatacttccttatggaggggcttggcttgagcaggagcccagcctgagcagagagcagcagaagctcacgagtggccaccaccagggcataaacagtacaatgaacgccacaaggaaagagttacctctcggactcataagggtctggaaggagagcatcactagagatgcaggaggaagtcgatttatcaaagtggtacacggaacctaaaaggcaaaccaacatgtcagtttaggtgcagacatggctcccaagtcacaggatcatccaaacagtcacaggcgccattctggttatggcagctagaagagctaagtgggcatttgccaggtttactctctgattatgttctcaaatcttgccctttttcttttttcttagtgagataggatcttcccaagttgcccagcttggcttctgggttgggattacaggcccacatttaccaggacttgtttatttaagtcttaatgtgccaccaccagactaaacacttaagattcctatttgttgattttcctttattcaaatgtcttaaactatttttgtgtacttaaaactttaagcaaaacacgttgtcacagaattttcaggtttctatggtcagagtaatctggactttagttttgaaatttcttggaggttttctccctaccggacagtctgtaaactgtacagccgagcccatcaggtgactcctttggtgagagtaatctcaccctcacagagtatggagaacaacagctctccaggctgcattaagagtcatggtggctcagaacctgattggtaatcagtccccatgacaaggtatgcaactgtcctagaattactgggggctttctgttgaccctggcaaatcctcacagggcacaagggatgtaggattctctgagtgttcataaacaaacaagatttggaaccagagagtgaactcctgcaaagccaatcatttttagcactgacaccattaaccatcccatcaatcttctgtaatcaccatggttaccagacccctttcctgttattcaaaatacaatgtaaacctaaatgaattcctcaaacctaagttagaaaatggtccaaaccagtcaatgactgcctaggaaacagaccacttgagtatttcaggaggaaagggacttggttatataggagacaggagagccatgaagtcaaacagagagccaggaagaatctacaagtggacgagagcaggaagcttcctgcccactaagctggggatgggagaggaggtggagtgtgttcttccctggccccataatgcatgtgcagatagcagcctcgtgagggtttaaacaaactcagaagtcagatagatacacaggagccgggggaaaggagcagctgcctgcagaagaagcaggcagaggaatacaaaggatagtgtgacggctattcttggttgccaacttgactacatttggaattaactaagacctaggcggctaggtgcacctgtgagagagttcctttcctttttccttttctttttttttgtttttggagataggatttctccatatatagccttggctgtcctagaacactctctgtagatcaggctggccttgacctcacagagatctgcctgcatctgtctcctcagtgctgggattaaagatgtgtactaccactgcccagcttagggttttttttttttttttaatttaaattttttacaaaagaacttcattttaggattaaatgaattaatttaaacatgtgtgtctgtgtgtctgtgtgttgttatgaatgccagcgatgttgtatgtgaagacaaccttcagggttttgtcctcaggttctgttcactttggttattttattttatttttttaagacagggtttctctttgtgtagccctggctgtagaccaggctggcctcaaactcagagatttgtctgcctctgcctcctgagtgggattaaaggtgtgcattacgacagctcagccaccttgtttttttagacagggtttctcagcctggtgctggctactaggctccagggatctccagtgccatgtagataggttttagagactgaaccctggtatttaagcttagatgatgagcactttgtcaaccgaactatatctccctagaccctggaataacagtaaatacatagaaaaattcaaagaaagaaatactgttcccactatttctcctaaagttaactattaaaaggggttttacatttattatatgtgtttgttcatgcatatgtgctctctctctctctctctctctctctctctctctctctctctctgtgagtgtgtgtgtctgtgtgtgatgcatgtatgaagtcagagtacaactttcaggagttgacacttctcattcactatgtaggtccctgagattgaactcaggttatcagcctttgaagcaagctcctatagcctcagagctatctttggcttaatcagctatacaatttataccgattttgaagtctatctcatttgattctttagtaacataaaaatgatgactccatgttttagagatacagatatttgaaactggttgcattgcctgtcacttcttagtcctgtacctacttagagtcacctatggatgccttctcatgggacttcttagcatatctcactgaagtacatgctatagtttctctgtctcactcatgctgggctttgtcctgtgacttgcaacacaaatgggggaaagttccagggtgaggctttaggaggcaccactggtatctgcttatatgctgacacatctgtagtccacttgagaaaacattgtccaaagtggcctctgtgccttcagactggaccccagagtaagacacagactagcctagactggctgaaccttgggacacagcagacctgtggttgctgccataaacagggaggggttaagggcgggggatctgttttttgttttttgttttttccttggcaaaagctggctgacactccattaaagtgggttccacagaggaaaagaaagaaagaaagaaagaaagaaagaaagaaacctcatcatagggcaatgtggtgcacacctttaatcccagtactatagaagcacagacaggaagttctttgggagttcaaggccagcctagcctacctagtgagttccaggacaactgggctacacagagaaacactatcttgaaaaacaacccccccccccccgaaaaaagaaacctctttaacctgtcacccactggacaacttacttccagatgtcagttcaaagtgtggcctcccttcttcagtagccatgagggtggccagtttcccctcaatcatctctccatcaataaactttccatagagtgcagtcctctgatcagggtagacataggctatcttctctccagtcatctccccatcttcattgacttccccaacgaggctgcctccatcctggtgggagaaaccacaactggagatattgtgtaaaatattcatctatgggatgtgagtttaagaagttcgttttctgaaatgcgctctgtgaagaatactgacaccgacaataacggtataagaatccagagcttttgagaagagtgagactcttcatgcctctgcaggtagtacctttactacatgtaaatacacttctggaatgttctatgcactggaacatgcatgcctcatttaggttaggagactgaaatttactttgtaattctggactagttactggcactctagtttggtgtgttatctaagaaacaaacacattattatcagaacagacttgcagacatttaagggaaatataattaagcacacacctgtaatatattaagggaaatatattataggataactatatcacaaatatattacagcacacaccctgtaatcttagcactatggaggcagaggtaggcggatctctgatttccgtgagtttgaggccagcctaatctatctaggacagccagggctacatagagagaaaaacaaacaaatgaaaaacaaacttcagttaaaatgtgcttttctttttctttttcttttcctttttgcagcactggggtgaacccagagtccaggacctttcaggattgtacatgctaaacactctacctctgagctaaatctttatgcctttaaatgtacttaagaattaatttggtctacccaactaaaaatagaattgcttgtattttccgagtgataaacaaaggcccttgtgtctcccacatcagttcttcctttcattcttcatcttcggctctccagcctccctcccagagaagggccagctttgcttcattccacaggacaaatgctaccggaattctatgtcccactaagtgctgggtcacagcaggtgactcacaaatacctgatacttttattttgtgtgtatgttcctgtagatgcgcatgtatctgtgtgggtgagcacgtgccatggtgcatgtgtggaggtcagaggacaacttgcagaagtcagttctctccttccaccacgtggattccaggggacccatcacactgccaggcttagtgacaaacacctttattcatgaagccacctcacagacaccttttagttgaactaggatacccacagcattatggctaatttcgtttaagatgcaagagatgggcccctcccctggaagtcctaactgcgtaacttaccaatctaagtcctttgtaagcttgctaaacaatttgataccatggcacgtggggtagcttggataatgtcctcactctagtatctgggaacagctattcaaggcagcaattcagggtgaccctcagtgctgcttactgagacagcaataagtgacattacacaagcattacaatttgcatagctcaccacataaactaaaattcggaacttttgaagaaaaacacacagcattatttttcataggcaggaagcccagtagggtgacacttgttgcttgttgtccttctgaagttaattcttactaatgcagtgtaaatggggatgacctttctgtgtgatctgccttcaggctgctgctgagcctcagagtgttagagcatgggtacttcttttacctgccataactaacagaacccaccatgttcctgctcatttgaagcagaagtctgtgtttagggcctctcgccttttccctcaaaagttgaatttatttctttggactgacaaaatagaaatcctttgattttctaaagttatgaatcttttaaaataaaaaagtgcattggaagttaaaaaccaaaacagaacaaaagggcttagtggggctgcagatgacatcttttggtaggacactcagctagcacatgccaggccctgggtttgaatctcagcactgaacaacctgggtatggtggtgacacttgtaaccctggaacttaggaggcagaggtagggggttcagagtcatcctcagctacacagagaatctgaggccagcctgggccacacaagatggtcttgtaagaccctcggaaagcccaggcttccagaatcttagcccaggactgcggccaccccaatcacagaatggaggcaaaagtttgatgcaaattgcatgagactttattgtagtttaacgagctaaccccatgttagctcgggtctttgatccacccaccatggtggatggatagcaaagacagtttgaagctgctgtgcacagatttttatagggcagtgtaaggggaatgtctaggggtatgcacaggctcaggattggtgtgcctccaggcttggagggcttgccctgtgttgattggtcaactggttgttatggcccataggccctctcagggtggttgctatgctttctgtgtcattgctgtgcggttgtccgtaaagcacacccagagccataaagcatagcgccaccagctaacttccgattggttccttgccacaagacagggatctgactttctagtgactaacttctgattgtttccttgtcacgaggcaggcatgttactttctagtgtctaggacaaggtcacagaagcaagtgttcggccgttatggctgccaaaagggaagctggtcccttcagtctcaaaaaccaaaacatcaacatttctatcgtggttcttagagtgatcctataagtatgacagggagaatggttctgtttttcctacccttattcttgccatgtcacaaacatggcccaattgctctatcaaggggtattgaatgggaagaggccattgccttgtttcttctgctcactggctccctctgtcagaaggaggcgttattgtgattggtgagaaggcaggtcaaatgcttgctgacaacccatttctctgctggtggggattaacaaaataaaggcagcttttggcgtccagttttacttttcacttaccctctctcccaaggttcctaggcactgccttgtcaaccccaagaagtcccatatctctcaagagaagcttatttcttttctttctttcttttagtgctctgtctgccagaagagggcatcagatcttattattgggatccacaatgtggttgctagaaattgaactcaggacctctggaagagcagctactgcttttaaccactgggccatctccccagcctgctcaagaaaagctttagcagtgctttagcagcagaagggactgagaggccagttgtggctttgggttcacaccatgcctccaatccaaaggtattacaatgaaaaccagcaattcagtccttgacactactgcctatttctttattgattcagactccagacagcagaagggtgcaatcagccccttctactgtcatccgataccacacttaaagcaggtgccattgactattctgaaagctaattatttcccaatgcttccttcccaagtggtatttgataagaccacagggcaaaatgttgctatagcagctgataggtggcccgcactccagtggctggccccacctacgtacctgcagcagtgcttattggacacgggattataaaaaaatgagaaaagaggttgggcggtggtggtgcaggcctttaattccagcattcaggaggcagagataggtggatctctgtgagttcaaggccaagcctggtctacagagtgagtccaggataggctccaaaactaaacagaaacactgtctggagaaacaaaatgagagagagagagagagagagagagagagagagagagagagagagagagagagacacacacacagagaagaacataaaggtgggaactcgagctgacatgttggggatacctgggggattgggaagcagagttggggttacatatgatgaagacatgttgtacacatgtgtatcaaattgacaaagaacacaaaatattccccaaaaatgtcgctgtatattttaagtttcaaaatttggctccagtcagtgagatgaatgcaaggaatggtctcagtgtaccttggatctcatcacaggacttcggttgatcctagtcagaagtaaaatgacagggagtgggaggctctgggattcctgtttcgtctctctcccatcctctgcctacacagggcttcactcgttcttctgacaactccctctttcaaatgtcagtagctccccagcacaggcagcatggagctcagcctggccactctggaagcccactctcagccttctggacctgtagatcccttggcacctgtctatctgcttgtctgcttctacctagacagtcacctaaatgatatctcagggatcagagctgaacaagaggagacttgcatgtttgggcaagtcttaagacaaagagtagccacattcttcccttggagtatagtttctttttaaaattctctctctctctctctctctctctctctctctctctctgtgtgtgtgtgtgtgtgtgtgtgtatgtgtgtgtgtgtgtgtgtgtgagacagagagaaagagagagagacagacagacagacagacagacagacagacagagaggtattggatcccttggagccccttgtgtggatgttgagattcaaactccagtccttatgatagaacatcagcaactcttaactgctgatccatttccccagtctcaaactcccaggtttaagcccagttgtctcaggctctcctagtagctgggtccacaggtgtgtaaactgtgccaagtttaaccaatgaaaaacacgattgtgttttctgggcacagtgtggtgtgtgttcctttaatcctagcactagggaggcagaggcagttggatgtctgtgagtggtctacacagtgagctcccgtactgtcaggaatatgtagaaaatccctgtctcaaaaattaaaaaacaactgtatttggatgacattggatgccctgctctgtgtctctgccttattcccttgaagcagggtctcattgaacttggaggtgtgccagcctcagattctcaggaaaggtgttgtgagtgcgtaagtgaccaagacaggctttttacttggtttccaaggatttgaactcaggtcctcatatttgtagcaagtgatcttatctgatgagccacctaaacagtttctaaagaataatagggtgggactgaagatagatggctcagtggaagagcactggctgctcttccagggtcctgagtttgattcccagcaaccacatggtggctcacagccatctacagtgacatatgatgccctcatctggcactaagtcgttcaagcagatacagcacttatatacataaaataaataaatgaatcttggaaaaaagtaaaagtatgaacgttgtgtatgttgtttaaagcaaaaaagagcaatgtgagctggtgagatggctcagggagggggttgggggtgggggaaaggtgcctgctgtacaagactggagacctgagctcaagccccagaacctatgtaaagttggggatggatcctacaaattatcctcacctgtcatacatatgcatgacacatacattcccacacaccatgcacactcatacacaaataatacatcaagaaatataacaatgtgtaagtacatttgctgggtatcacttttcttgttttacatgtaatcatttgcttttttgggacagagttttactatgtatgtagcccaggctgacctcaaactctgtaggtcgttgagactgaccttgaactcttgatcatcttgcctccatttgaaaatgctgggattccagcaagcaccactgtgcttggtctgttcttactaattcagagtaagcaaaaaggtattttcagttaagctctggatatgataaaacagtaaacaaagtatatctgaaggtttattcctttcaaaacacagttttaaattcatcaacaacagatggagtatttgaaatgcaaacaaaagttattaattcccaaccatgggctttgccatatctatttgctgtagttgactcaaaaccagcattgttaccaaacacttaaaggcaagttaggataaatcatcttaatgctagcaatacaatccatgacacaccttcatagtgaggggattgtaaaaatccagctgcagtggtgtagtgactccaaaaggattcagtctcactataagagactagataaaattaagcaacagctgggtgagatggtgcatgcctttaatatcaatacttgggggcagaggcaggtggatctctatgagtttgaggacagcctggtctacagactacatttgaggtcagccagattacacagtgagagcctgtctctcccccatagtatttcttttctctctctctctctcttcccctcctccccctttttttttttttttttttggcacaaggtctctctgcatactcctggctgtcctggatcttactacattctgggattagaggcatgtcatcacacccagccatccctcatatgtatttcaacaatgaaatatcctaccacttccttctacatgccaatagagttaaaagcaacttatcttttactttatatttttggttgtgagcctagcctttaacagctgagctatccctccagcctatcttttactttataaatggtacaataaaactagtttgtgccagtgatgagtaaatactcaggaatatgctatgagtcagaagaataattaataaccatctaaagcctagtcatctaagtcatggagaaccacagcaggtaggtgggcatcagacactctcagctctagcgactgacccatggcttcacagtgaatacattttactgtttatcatgagaagtcaaaacattgtctttagacacattcctttcccttagagcgataggtgccagcttactgggtaatggatccaacacactccatgtcgaatgttgtctttgtattgccccttgaagatcagcctcccatcggtgtcatactcctgggctggtccattcagctcaccatcgacatatgtgccttggagaacacccccatcctcataggtgtaaacaccctggccctgcaaggcatcatccacataatatccttccagggtgctgtcagacaagggagaacagaaaggaacagtcagattacacagcactatccatagttctctctctcattctctctctctctctctctccccctctctccccgtctggcatacatgtggtgggtagaggatattttgtggtctttggttctctctttccactgtgtggggcacagggatcaaactcaggttgtcaggcttggtggcaagcacctttactggctgagccatcttaaataaagggtcaggtacaagggcccacatgcccagctctgtgtccaccgtttcatgtattcaggacaagatctgatctggaattcccatagatgggtgactaggaaaaatgcagagaggtgaataatagttggtgatatcggctcattggtagagtatttgcctagcatgcccaggccctgggtttgacacataacacataacacataatctccttaacacataatctcctgattcctcagaatctcttctcttttttctttgctaaaataaagagagaaaaaagccccagaggttgggctgagaacaagtctcagctacccatgtctccatggccaggcagatgcccagcttacgctgggcactggcatttctactgttacactctacttaacagtgaggagcactatgcttctctctggggttcttgaggccctcttaaacagcttgtatacagggctcttcagtcatactactaaggtttagcttatgcaaatggccatcttactttcaagttactaatattttattctatagtagcaatgttaattggcatccaatcaaaagactctcctttgaccactttggaagatcgacgaggacttatttttgtgttatacagtcatgtgtcccttaatgacagagacaggctctgaaaatgtattgttagatgattttgtcattgcatgaacaacacaagtatgcacacacaaatctagatgctatagctggctccatactgaggttacagggtaatcttgcaggacttttgtggcatatgatgttgatggagtcatgtgtgtggcactcagctgtacacatgtgctcatgtgcaccatcatggacaaaaggatcagtgggataaaggagggagattgtaggctcaaccctgcttgtcctgctagtaggctgataaagcccaagccccatggctggaccagaagaaagctcacagcatactcaaggtgatttaactgttcttctcttattgctgtcctcagaaaacacgtttggaagttcagaaatatgatgtctatattcttatgaaatggaagtaagtgtatcacaaataccatttggaataaagggaagggcagcttaaaccattttttaaaatttaaatgtaagagttaaccagatggctcagtgggtaaagggcacttgctaccaaatctgagcatctgagtttgattccctggacacacgtcatggaaggagagaaccaactgaggcaagttgtactctgacttccacaagcaggcctatacctccctacacataacacatatacacaaaatgaacaaatgtaatttaaagattaaaaaaacaaatgttatatattcagaaacaaagatggcttgattaacacccagcttttagtcacagattcagctagtaagtatcttaaggtatgcattctatatagtgaggattgtatggggcgctagccagcatggtgaacaggataactacagcccaacagtactgcctagtaagcacacgctgctcaagaggccacgcaggatagaccacaatacatactaggtaggcagggtaaacacatgccttatactgggacacgcatacactgtgtactggattaagtaggacaagcaaacatcatgtactggcttaggtaagacaggcacacattgtgttcccgggcaggtagaatgcaaagtgacacacagggtttgagcagcctgtccctgactgccgagtgacatcttgtcttatgattgagaatgatctgtaattattaaatgaaatgcacagcctgaacagtgacagcttctcatttcattgtaattacactatttgtggtctcccaaggagataaatagttctctttcccgtttgtttgtattatcaatgacaaataggcttattaaaatcatgaatggaataaagtatactttaacatagcttttgcataaataatcaaaactctaaattcagtgaaactgaattaatgagattcaactgtcattagattcacacaattaagagaaggattgctaatcaacagactgggtgatgtgtgcagtgcagggaagcggttcagtcatctctctccatttctgggaggcattgtgaggtaagatacaagaacagccaggtggtagtggtgcatgcctttaatccttcaacttgggacacagaggggcagaagggcagaggggcagaagggcagaggggcagaggcaggcagatttccatgagtttgagaccagcctggtctacaaagcaagttctaggacaccccgggctacacagagaaaccctatcttgaacctccaacaaaaaaagatagaatatgctcagtgaattctgaattttaggcaggttatgaactttagcaggagcatatcccaaatattgaatataagatacaaatatagacatgttgtgtctgaagttttgatttaaccaagtgctctcagtttttatttgctagtcctggcaacccatttgacttcagatttccagcagcattcagaatgtatatttgggtattttcccaacagacaagtctgcaagtaactctcagactcatgatcaaatctaaaagtcacaggtctctcagacaagttaaaaagaaaagaaaagaaaaaaccagcacagacttgcacatgtttttgtgagtgttaagttcacgaatgccagggctggcacacggaggtaagaggacaacttttgcgaagtagttcttccttccactgtcgagctcagataaggcaagacactgagtcatttttttgtttctttggttttgatctttcgccatacagggtttctctgtataggtctggctgtcctgaaactcactatatatatagtccaggctggtctccaactcacagagacccgcctgcgtctgagtgctgggactaagggaggtgcctctatacccagctccactgagccatcttattttgatctcagtcccaaccatgtctgatggcttgctattgcctcttcgcctgtgagcctattctcacttccctctcaagaaacagtcattttcctctttgcacagctgacttactacacacagtgcagtttaaggcaggacagcaaaatgctctacagcttagctaaattccagagccctcaaagccacctttttagggaagtaagaaagatgcttctccttctgcagtaatttataaatgatccaatttgaatggaagaaggaaggaatggatacctttaatgttagaaataaaaaatagtgtgtttttttttaacaaaataaactaagtatcaccaagctacagaaagtatacagttttactattcttgtactaagtatttgactgactttttatgtaaacattacacatttccattctccctccccatcctctttctttccctcctccatctctttttttgttatttggtctccctgtgtagctcaggctagcctcaaactcattatccttctattttttccttatgttgggattacaagcttgtaacaccatgctcagctctgtattttgctgttgtttgttttgagacacgctcctgtgtactcaggcgggccttgaactcactatgtagctgaggaggactgtgaactcttggtcctcctgcctctacctcccaagtgctggaattgtaggaataggccaccactaacagcccttgctattttaattttcttttttctttttatgtgtgtatttgtggtgtgtgtgtgtgtgtgtgtgtgtgtgtgtgtgtgtgtgtgtgtagaggccagaagagggtgtcagatctcttggatctggggttacaggtagttgtgagccatctaatgtgggtgctgggaaatgaacttgggtcctctggaaaagcagcaagtgcccttaaccatggagtcctctctctaggcccagcttgaatgttcttaagccgtgctccctaataacattttggcagactcctcaggatgatagtaagaaataacaaaaatggccattgggttgtttaattttttctggcaatggcatctaagcaaacaactggaaaacttaggggatatgaaaacatcagtttaactacatttctttctcctctacatatttaactcctctacagtttaactacatatacaggcccttttattttatcaggtgctaagtttccaaaaacaattaaacaggaaatataacttcaaattgtggagaaatttagcagcttctcaccccaattgatgcacctgtacttaatttaaatactactgtttcattgacagccacctctgtagtgtttgaatacacaagagcagttgggaagcttggcttttcttcatggtttggggactgagaagtttctgtccttcccacctcatgggcctgcctaacagttgttccttttctctaacagctgtgtccaacctgtagtttgtgggctgtgtatggcctgggacagctttgcatgtggccaacaccaaatctcaagcatgcttaaaagttaagattttggggagaggtgatatattctttttcttttggtaactattatattgtgtttttcaagtctgaacttttgtagatgataacattgtgtccaatacaaaaggttggacacatctgctagtgtattctcatcaacataagccttgagaaggaaacttaaaaatgaaccagattctactttaaggacctatctctaacgattcaaactgtggcttagtgcaaaacactgttctaggaattatctcatgtggctgaattattatctcatactgcaagccgatgaaggcaaaggagccctaacctatctgttaaagttacttccagtggacaccttccaccttcagaagtgtgatgggcaagcagaaggaagtactttctgcaggtcctctggccatatgctggacactttcaaagctgctcttgtctttgtttttatcctttcacagaggacatgtgagtctagagaatctgatcagcacaaaggctcaaaataacagcaattagcaaaatatagttctcttctttaaaagaacaccctaaaaatgtactgctttggactgaatgtttaggcccctgtaaaatctgaagccttatttcccaatgtggtggtcctaggaggtgggatgttggggaaggtattaggttatgaagtcagagcccttctgagtgcacttactgcccttataaaaagacacaagggagcttgcttgctctggctcccttctccattctttgacaagttaagcaaccatctgtaagccaggcagcagatcctcaccagacatcagtctaacagcttctgatctcaaagccctcagccctccagaactatgagagatgaacactaccctaggtggacatgacagagctgaattgcaatgtgtgacgatggttggtatctggtactggattgcttacttgatgatgggggctggtgtgtgtgtgtgggaaaaccacaccttttggagtagttgattgttgtgtgagtgtagcaacattaaagacatttgacacttgcaagttttccctaacaagtagtcttctaggccattgtaatcaactaagattagagtaacatcaggattggtcaccatcatcatcctccccctccagcagacacttgccaggtgtgctatgtcttccaagatctttatggcttttctcattcaagcatttatccccatcctacaaatgagaaaacaggagtttggagaggccactactaaaaatgaccccttaggaacaccttccatcaacctgctgggcttccagcaaatgctaaagcacctatagaaaagcagctggccaggtggtggcagcacatacctttaatcccaacattaggtgcagagggttgggggaggggggggcagaggcaggcagatctctgtgaattcaaagtcagcctggtctacagagcaagttccaggacagcagagctgttacacagagaaaccctgggtcagaaagcaaaacaaaacaaaacaccaactaaccaactaaacaaacaaactaacgaacaaaaaagttaagaagtgatcttaaagaaaataaagaaagcaaggaaaaaaggaagtcgacccatcactatttcctcacttatggtcagaatggagtggcagatgtagaaaaaaaaaaaaaaaaaaaaggttgcctctaaaagtgaatttagtcagtgtttcattcctgtaatctcaaaacctggaaggtagaggcaggagggttgggagttcaagatcatgctcaactacaccatgagtgcaagactatcctgggctacacgacaccctgtctgagggtagtggggagaaagcaaaaggaaaaaaaaagaaagataataaagaattgaattcacatcaactctaactcttactaactaggggactctgggaaagttatttagcctctccaagccttagtttcttcataaatgaaatgggattgtaaacccaaatatatttatttgctgagcttgatggtcaagaacacagaaaggattttgcctcacatgagaggctggaattcgtgacttcaaaagttcatttccactgcagcttctcggaaatgtgaccaagcaccttctaacaacctgggaaatgtcaccatctgcccctcagcacataggatccctctcagcaggacacagcagtacagggaaccagcgttagaaaacaactttgggaggccggatgatagctcaattggtaacctgcttgccttgcaaacagaaggatgtgcatcagtcccttagaacccacttacaaaacaaagccaagtgtgatggcatggattcgtaatctctgtctagccagagagagaccctatctcaaaacaaacacaaaacacaccagatggctcatcaggtaaagcacttgccaccaaacctgataacagctttatctctggcacccacatggtagaaagagaaccaactcttgcaagttgtcctgtggcatggttagctcctcccaaaaaataaatcaatgtaataaaaaaaaactataaaatcaagactcatggcaatgaggagcaataatggagttttttatcctccacacatgtgcaccacacatcatacacaatacacacatgtgcatcatatatacacttatcacacacataaacgtatatatacacatgtacatacacatgtcatacacacacacacacacacacacacacacacacacacgaaaatgacttgggtacagaaaactaaaggtatgcagtagcaaatactttgaaaactagttggcatagctaagaaaagcatcaacaataaatattcacactctgggttctatggcacacaacgatgctcccagcattttatgggatgaggcaggaggacagcaactgtgaggacagccaggtaactagaaacagaattgaaatagcaggagatgaagcttggtggtagatcacttgcctggcatcatgaggtcctgggttcagtccccagtactgaagaacaatcattcatataataaattacctcacttttaccttgggctaaggacaacattactccctaatatgaccattccaaagcctcaaaatagatgctgctgggtttgtttgtttgtttgtttgttttctttctcttttcccagttctaggctagtgacaagttctagctctaggtttacaaattttggtgacacagagaacagctaaactgtacaaaacatccagattagaggttacaatcaatcagaggtgcagatgtcaaagcattctcagtaccagagaaacattcctacaatatcctcaggaccatccacgtggtcaggctccagaccacgtggcacctgatggggagtctccatctctacctgcccactaaaggttcagtttcttgtggttaacggggagtgtattttggcacactggctcaaatcttcagggtagcttattaatgttcttgtacaccaggtctgtaaagctgataggtaaatgccaccaaatacaaccaatttgatggattattttcctaagagtcagtcaattgttggctatctttatctaactaccaaacttaaaagatgaatatgctcatgtgtatgagtgtgtgtgtgtgtgtgtgtgtgtgagtatgtgtgtgtgtgtagccatctggataaattctaacttgctttcagctcccacatccacgtggcaaggactttatcattgttttaaagtatcacattaagggaaagtgtcataaagtacagtagaatgtcatagatagagaaactctccttaggtggggaggagaaataagacatttacaaaaacatatattgttgaatgaatacaaatataatcccagcataaagtaaaaattgttatttcccagtaaaagagctttggttaaattgtcatgcaaatggaacaggagaattacttttaggacagagggattctgaaagaggaggcaacaccctgaaagagacccctgggggccagtgtgtgtgtgtgtgtgtgtgtgtgtgtgtgtgtgtgtgtggtgtgtgtgtgtgtgcaatgtgtgagtatgtgtgtatatatgatgtgtatgcctgtgcacattgagcatatgtgaggatgggcatggtacatggggaggtcagaggacaactttgggggttagttcttgctttccagcttgtgtgatgtcattgagctatgttacagtttttgaactgtatttgaaatgaatgtgtgcaagatggggccccctgaatctggcttggcagaacatcactgaacagacacatgccagactcagcataccttagactggcttctgcacagccaccactgtcatttctggtcaccaaagccttgcatacatgttgggattactctcactcaccttttacatgaggggtatacagactttgaattgaattcttgcatttgtatcattctttgatttgaaataattggagacaacccccaccccccactgccagccccaaactaaacagaacagagagggctacctgccgtcaaagaagaagaacttcccacgtccattcttttctccatgcacaaagttgccctcaaatctgtctgtggaggagtaggtgacagtgcagaatccgtgtggtaatccatcatcatccaggtgtcctggggaaagagaaacaggccataccttaacaccagactcaggatgcaaccgccattggctcagaacttccaaaggtgccccttctttgtgtgggggccagaagagggcatcagatctccctgtatctggatggctgtgagctgttggaatgggtactgggaactgaactcaagtcatttgcttgagtaagtagcaggtgctctgaagtgctgagccctcgctccagcccgctttttctgtgtcttgaaaggactaagcatgcagaacttgatgttttgtatactttcatgcatgggctggtccacacagaaaggcctgggcatgtttgaagacacggagtctgtaccggcttgccttttccctgggattgggatttattatcagtagggccatctgcagcactagttaccacttcccaagcttccccatgtttggagtgaagatcccagcttctcatcttaactgaaatgtggctcagatggcactgagttataatcttattcttacatgttgcaagcatgcaatatgattttacatgttatcctagagtatgatattgagtactagtagagtctggatgcaccattttattttacattcagacaacaaaggagtcatgtgcctaaaactgccctagtgtttgttttttaaatggagatgaacatgtgcacactgccactgaaatagggatcttggaccccagaaacaattccttacgctcacctttgacctgctggtgcttcctggttacacagtacacatctggagtcagcatctaagtatctaggttccttgtaactacatgtttcacaaactcaggagcccctcattaacatccccccttcatctgggggagtagattttgcagaggtgagtgagaataaaggcagcaattactctattgtcttttccctagagttaacaacctggatcatgggtgaaaatattaaatactgtgcattgcacaaaaatgtgacttccagaaggctcactggcataaaaccacaaaccttgccgccacaatgaattgctttaatctcctaaaacttttattttaagatgatagagtaccaggctgaggatagaacttagtggcaagtgtttagatagcatgcctgagaatgtaaataatccccagcactcaaaaaaaaatagaaaaatatagaagttacaaagaaaggagtagtcataaagaaataaaatgttctttttattattgactactgaaatgttttaccgctctacctgactctatgtggaatgagttacctatgttgaactaagtacaacaatacatactattacttatttgtttatttatgagtgtgcctgtttgagttgatgtgtgccatacacatgtaggagccgtcggtggccagaagaggccactggatcctctggaactggagttacaggtggtgagccatcatgtgagttctgggaatctaactaagatcctctacacatgcaagcagtgctcttaacatgagctgtctcttcagcccctatatggctatgcaaacacaccacagacggccatatatggctctgtaaacataccacagacagccatatatggctatggaaacacaccacagacagccttatatgactgtggaaacacaccacagatgggttagttcctttctttaaacacaaccttttcctacaagggtcagggaatcaatcatcagcagggaactagcacaaaattgctttattttggtagaaaaaatgaattacatgatataattctgacacttgagtcataagaaatgttttggacaagtctttctaaatatctattgatgacaatctttcattgaaacagatcaagtttagttttttctcttttaataaaaaatactcaatatagggctaaaagctttctcttatgaaacattgaaatcaattaagtgtagccattagcattccaatgaatgtagtgtcctacttttgatttaggtagagatatcagaataattaggttattctctcaggagagtaattgctggcgtgttgaaaatgctcccacaatagaaaaggttcacacacttcagattttaaacagcagttgttaataaaactgtttctcttcttgaaatcaagagaaacacgataaacatgaacacagaggggaaagaaaccagtgaaatcctccctactttgcttcctcccttgtcctatttctgaaccaaacactgaaggtatgccacactctgcactgaactcagatatgaaaagaaaaaccggaagttgttgtgtaactgaaagcaggcacaggtcacttctgactccaggtgagagggcacccaaatctcatctctgctccatttggaccccttctgcaacaacccaatggaaaaggaaccctttcactgtttcctagagggctgccaaatgacagacacttctcaggtgaccttgtgcatttagaagaagatacatggatgggtgaccgttctctgctagtctggctgcatatgcaagttctcaatctgtaggacctcagcaggagttccatcttgacttgttctcttttgcatccttagatgcaggcaatgaaaagcactaggtgctgtgaactagagagagtgtctggaatttctgtaggtttctgggcagtgtaaaactgagaagtagctaccccatacatcagcaaaaccaacaagctgggtatggtggcaaaagcttgcattcttcctgctggggattgggagttcaaggaggacctcagcacataggaggtttgaggccagcctgggctgcccaacattctgtctttaacagaaaacacaacagaacagaacagaacaaacagccccagtcaaaacaataacaacaaaaagacttgcaaagcagaaaaggctagggaacagattagattgttacaatcctgttgccttggtacataagtgctgtgagagatctcagcacaattcttcttcaaatgctgctgagacaacaaggttatgtgttatcacaaccttagtagcaagcctatggggaggaggctactatccagagggaaaaaaaaattgtgaagctactctttggggcagtgcatagctagactaagtgctttcttgttacctcttttaaacctcacaacagatgactatacactaccacaaaaccttcaagagaatgctgatcactttaaatgaaaagcccctgcctcgaacacaccaattcactttctctctagagaaaggcagccaagattggtgctctttttccttgctgatggcaagagcgggaggtaccacacagcagttaaagggctttctgttctatccagcatcacattgggctgcttacaaatgcttgcaactccagctccagggatcccaacccctctcctgccttcccagggcaccaggaacacatgaataataggagcaatctaaaaagaaagtgaaagagaaactgtttagggaaacaaaggagactaaagggcaggcaggagactatggggcaatatattcaaagtaaactacatacgactatgaaaatactcttacataacccagaaccaagtatgatgaaaaggaaaaaaaatacggtaaaaaaaatcattgtttcaagttttatgaccgtgtaaaggactatgcactattgagccaaatagtgtactgtgatttggtatcttctcatataacttttcaacttaaaaatttatctttaaaaacaaacaaacaaaaaacaacccactagcaatgcccaggctctttatagtgaaatgcaaggagtctttgtgggctggctgcagagaattgccaagactgtcaacatcagaccttggttgcaaattcctagcccttgcctgtgttgcctaactccgtgtggaaactctagtctttgctgaagactacagaatgtgccgagtcagccaaccaccttccaggccagttcccactacacagaaggtgggcatcaggcccacaaaacaggccaagttcactggaatgaccactttgtgctaataacacagcctcagcaggcgagccacccagaatctatctgcagacagcctgaatggtagccagagaaaaggggaagtaacatgcctcatctccccctcccccattttgttctagatatttttctctaccagaagaatacaaaggtaaaattttcccccgaagttacctctgagcagagttttgttttgtttttttcttaacttgataagattagtctgttatggtgctcactgtggagcagagatgggcccctgaccatctcctgctgacccacagagatctgacagtgctgtgtctatttccctcagagcaagagaccctgacctatgcatactgctagttttgctgacaaaacactgctcctcccctccccccacaaaagtcatttaagaaaaagcaagtttattaatgcaaggactgtgccttctttatgacgtagtcacagtggctgtgaaaggcacacgagctcaaatgtgagggtcgtagttttcatgtaaatttcatggaatgggtgcagtcagaacacagcacactgtcccaggcatacaacacagatgcgtgtaagagacaggcaggatcggacagttgctaataaaaagaatccatactgttttgaggtgattgggacagaagaacatggagctgcttgcttccttcttggctccttgttctgaggattctgatactttctcattttgaacacttttccttagtgtgtcttatgcatttccagccttttcttttcttctctttttctatcctcataactgcacatctggtaccacaagatccttcaggtgaaggcctcagctattgtttcagccctccaactgcctactgcgtcagacaatggaacttcctgagcagccctctggcctgtcattcttcgctctatggcctccattccaacatacagcctacgctctcagcctgtgaccctttcttttctcatctgccccttgggtgtcatttcttcttttcagccccatgtttcagctagagtgaaagtattttctggatgggccaaacaattccacacctctctccttcactcaccaaactctactcttagctcaatgctgccacttctccagggcagtcttatcccatctgcttctctaggctgcaaggaattgtgagcctcaaggtgctctcacacgtgcatgcctctgtgtgtgtgtgtgtgtgtgtgtgtgtgtgtgtgtgcgcgcgcgcgcatgtgcatgattcttgtagagaactggggttcaattcccatcacctacatggcggttcacagatgtccacaatgccagccccaggatgcacatgatacacagatgtacatgcaaggaaaacatttatatacataaaaaaataataaatctaagcaaaataagttttttttttatttttttaagggaaatgctttaaaaaagtaagaagatgtaggtgggtatggtggttcatgccatcattctgcattcaggaaagttgaggctggaggactgggttacacagtgagttccaggctggcctgcgctacataatgaattccaggctagactaggcaataaaatacagaatgagacattgttgagaaagaaaggaaagaaaatgtaggtagacaatcaaaagaaagaacagtaggacaattgacaaaggaatttctgcagtctatcctgtctcccttctttgacaggtgttcttaacttctctaagtttctctataaaatgaggataatatagtatccacctcctaagactggatggataatgtctgagaagcacttagcacagactgcacataataagagctaaacaattacagagatgatggtaataatagctgtgacaaggaaaccagtgagaagacaatgtgtatgcagagttgagtagctggtgaagaatcatcaagacacccagacgagtttctatttaggaaagaatcacagccgtttataccagttcagagatgtgtgttagattttaagcagtgcaaagtgccaaggccaacagtatctggagaaaagcccaaggatacagtttcctgtgagtacacacttgctccaggcaacctgaaaatctcagcctgagttgagtctaaaggcttttcatttcagatttattttattttatatgtgtgagtgttggtgtccacagaactggagttactggtggttgtgggttgccgtgtgggtgctgggaaccaaatccaggtcctctgaaaaagcaaatgaaatgttcttaagtaccaagtcatttctctagccctcttctcttttttttttttttttttttttgagatagaatgtaactattggtctaggctctgctggtctaactctgttagttgggtcccagccttaagtgatctgttccctctcagcccttcaagtaactggaactacatgaatgtcccacttttcctggcttttctaaggactttaaaatcttaaaagttactttggggctggggtatgtagctcagtggcatattgcttgcctaacacacacagcaaaataaataaatgaaattttgttgttgttcttttaaaaattcaggtatagttgctcacacctgtaatcccagcacgtgggtagaggaatgctgaaaggtgaagccagtgtgggctacagagatcttgtttcaaatcaaatcaaatcaaatcaaataaaaccacaaaaagttaaacaagaaagttactctacttttttacttttagaaaaattgagtgactgcccaagacatgcccaggtttaagcctgctgttgtagaataattattaatggtgcctttcttgctcaaatgaacacctgattaatagtaaccctgctctattagtaggataatgtctgctcatcctatataacaagcctccctgtttatggaaagaaactttagtgctttgaatccactggaataactcataatcaacatggaaacatacttttaaaaatttgagacagagctggcgttggcggctttaatcccaacactcgggaggcagaggcaggcgaatctctgtgagttcgaggccagcctggcctccagagagagtgccaggataggctccaaagctacacagagaaaccctgtctagaaaaacaaaaaaacaaaaaaacaaacaaacaaaaattcgagacagggtctcctctagttgaggctggctttgaatttgctattcagctgtggatgaccttgaactcctgatcctcctcctgcctccacctccatatgcaggtgtgtgtcaccacaaaaggtttttattcacataccaatgctaggagcataaatagcagcgcccattttcagcacagaagcactggggaaggtggctcagtctgccgcactatctgtgatcaatggtttgtttttcaaattttaagaaaaaacgaaacaagtaaagttgtaagtaaaaacaaaacaaaaacaaaacaaaacaaacaaacaaacaaaaaacagaaggaggagggcctggagagatggcccagtggttaagaacattggctgctcttccagaggatctaggttcaattcccagcacccacatggcaactcacaattatctgtaactccagttctagggtatccaacactctgcagacaaaacaccatagcacatgaaataacaataaacaagttaaaaaaactaaaaatatattgataaaaaagggaggaaagagagcaacactagcaatttgttaagaactttccccccccatcataacagaaaggtacaagaagtcaataacttgaaagttaaagaaggattcctgtggttgatttctctgggcctccctaaatctcaacattgagtttcctttgagagatataagctctgtgaattcacaacatttctagtctcttctgaagttacaagcaaaaccatgcagtttaaaattgttttttaaaactaaatgaagaaataagtttcacaacttaaattagaacggatgcctttccaagaattaaaaagaaaaaattattctacttcatcacacgctaagcctccagcagcctgtaaagcagttatgtttttgagcacatcaaaatgggatttctcccaaagtagcactagcaaatgcatatccatatgcattgtgaaacaccgccactttatttttctttatcgtttgtcagaacctgttcatacaaattagatcgaaaccagattcaaccagcagcttaaaattatttactgcgacgctccgtttaacaaatcccggaacgacactactcaatcttgcaaaacatcacgggaacattatctgggatagggtaaaataaataacaaatacgcttaagagcgttttacagtgttcattgttacaaaatcataacctctcatgacacaaacaacgagattgtataacgtccccaccgtgtcttttagaagttgggggcttaaaaaaaaaaaaaaaaaaaaaaaagaggcggagaaactcagcaaaaacattgtggcgacaaaagtcgggggaggggcgctcgagaaggggcggagaaacctgacacccaggcggtgatatcacccgcagccaacagcccggaattcagaaagttaagtgtcacccagcaatttcgttcccggctcgagtgcccgcaccctgttcggaagcagggagggggagggagcgggtggctgagttcgcccgggggcggcgcagccctggactagccacctccggagcgccgagcgttcgagcccggtggggagcgcggtgtgcactacctagcaatgatttcatcttttttttttttcggagggttggccggggctgccatgtgcctggtgtgcagccgggtgcgttgcgatgggagacccacctagacacgaccctggtggccaggggacgcagcgactcagcttggaaagggcagagggtcagagaggggaagtcgaggtggctgaaaggcagcttctcctcggagatcaccggtctaaagggactgccctccggcgccctcccctcctccatcccctcaaggaccgaggccaaggtgctggggcagcttcacaactcccagggaggatgctgctgtggcccgtcgggatgcaggggccgagccttcccagggccgtggaacccgcggggctccattccccgtctgtgccccgccgcgcccggcgcgctcccggcggtgtggcggtggctggggccacaccctcccnnnnnnnnnnnnnnnnnnnnnnnnnnnnnnnnnnnnnnnnnnnnnnnnnnnnnnnnnnnnnnnnnnnnnnnnnnnnnnnnnnnnnnnnnnnnnnnnnnnnnnnnnnnnnnngttccagtccctccgggtgctcgcggcagctgagcgagcgctggggctaagccctgcgagtttggaggaggaggaggagggggaggaagaggaggagcagtaggggcggatcgcgatgcctccccctacagtcctttcaattcctcggcctgccgcggatgccgcagccgccgtccctcctcccttcgtcccggtccccgaggctccggggtgcagccgccgctgcaactttctcctgtgatacccccctctttgttatggagcagctgatccgctgacatcacccggcgccggtgcgctccctccctcgttgattgacagttccctgtcctttcccagaagtgaggatccttagaaccgaaggcacttcggggtcgcgccgcctctgctaggctgtgggcaggcccggcggcggttgccttttggcttggggctgagagggaaagcnnnnnnnnnnggtcgccgccagctgctcgatagccctgggaatcgcgggggtatcccgcccgggggttggcggggcctcggagagcagctaccggagactgggaaatgctcggcgcagggttttcccaccactacccccctccaggatagctagagctcacgcggagctaaggaagcctttctgatgctcctgagcctcgactatccctctcgccccggcgctcccacttcacccggcttgccaccaccggcaaagtgcctcgcacacaggagcgcaggtgcctctccccccccccccccatggcccagtgtggcctccacaagccagtttcccagactccagggagcgacctgcgctccagattccgcccgacagcacgtcccacccaggtgtccccagtctccaccctctttcgtatctctaggcccctgggaagatccaggaattcaccaaacacaaatggcagcaggctggtaatcaggcctcacccaaggcttggcaggttccctctagcccttgtcttggagatggagccaccaagtggagaactggagccaggaccccgtgtctagcgcatctcctcacgccttctgtcctgtcctagatgtttttctggttttcccaagtgccagccacttctcagattcacgcatctttgagcgaagaaaatccgggttcccaccccagacacttaaaaatgtcattatagctttacctcttacaggtggcagtaaaggacctctttaaatagcgggttaaacggatgcagatgtacacaatgtaccgtggaattaccgggtgctggtctggccttctgccaagaacagctaccgcggcgggtgggaggggtgcagcaggaagcgaagaaaagttgttccatttgattttctgaacaatgaatgagctaggatttcagagcacttccaaggcctgggagagtcagcgtcctcaacttcttcccctcgcttcttaaatgcccctccccttattttttaaagacacgatctcctgtagcccacggcctccaactcactgtggaggataatcttgaactaatggtccttcccccatctccccagcgcagcaataacaagcactggccagcatgctgagttcatatgacactgaagaatcaattcaggttttgccacgctagcacatactctactagctgagctgcatccttggccattatggtaggtttaaaaaacaaacaaacaaacaaacaaattgggcatggtggcgcaggcctttaatctcagcagtgggaaggtggaggcacacagatctctgagtacaaggcaagccagatctatacagctatacagcgagttccaggtcagccaggggcagagaaatcctgtcttgaagggggaaaaaaagcgtctaagagaacaattatagagtcccaaatactatcaagacgtttaggtccatgctgacccctttggaaagcagagggtagtggaagatcagttaggattagtgaccctctgtgccagagagactgctttagcagtctgggttcctctttctgggcattagctgttctggtcacatcaggagacactcctctggtttaggctacacccctgtagggacctatggctcaggctatactgttctgaacttttccagacctttcttgatgtctatcttaggcttgacttccttaaggtcttccagggcaggcacctgggcccctaggctacatagaaatctgtttctgcagtgaaagtcgaaagagcaccttccgattataattgaaattttaattaattataaactaaatataatttaaaacatcttttaaaaaagattttatgtgtgtgtgtaagagagaaagagagacagagacagagagagaaagagagagagagagagagagagagaggagactctgtgtctctgtgactggatactgtgtgtatgaaggtacctaagggggccagaaagcatcagaacctaggagctggagctacagacagtagtgagcccttggatatgggtgctgggaaccaaacttgggtcttctggaatatcagcaagtgctcctaactgatgagccatctgaggccccattgtgcatcattttaaaacatgaactaccgaaacaagattttactgagtgtgtacatatatatgtatgtgtatgtatgtacctatgtatgtatgtctgtgcacatgtatgagtgtgtggagccagaggacaacttcagattttttttttagatttatttatttattatttatacagtgttccgtctgcaggtatgtttgcaggtaagaagagggcaccagatctcattacagatggttgtgagccaccatgtggttgctgggaattgaactcaggacccctggaagagcagtcagtgctcttaacctctgagccatctctccaacccaatgtgttttttgtttgtttggttggtttttttcaggggataggctctcttacttgcctgggactcacagagtaggctaggccttggaaatccacttatttctgccttcccagtggctgggattatacccctggtcctccgaatttgtctctatttcttttaaagcatgcattctggagattgaacatcttcccgggtctcagtttgattttttgaaaaggcatttactgcttcatccctttcaggttttgagctatatgatattccctcttattctcagattttacatatcaccactttccttacacatgatgctggtgtccaaagaatatcaaatactcatctccttcaggtactggacaataaagatgctggaaactgaaggaagaagcaaaaataacatatttctttactgaaggcggggtaatgtcagggcaggaaacgtctcctcagtaaacgagtgtgacagagtctcatggtgggagagtatgtgtggtgggaaggctgggtgaggagaagggtctgtcacaagtgttacctcttgtctttggtttcagagtaaagtcctcttgaaggagtgagcttttcccagcctatgttttctgagcagtctacctgtgttatgggccttccctgtgctactttgatagggtcccactccctcctggaagggatgggtggagagcagcccgaaccctttctgggttgttgcaggactaggaaggaactcactagctctttccacaaggcaggctgcagttgggacagtgcatctcagctcccttaacatttatccctcttggctttagaccacaaatttaggccaaatgtttttgctggttccctttttgggtgttcaaacctttacaaaaaaaattttttttttgtgctaagtttctagcctgatagatctttatttgtagttccagaacccaactgagcatctggaactaaatgtaggatgaacgtttattctattttctgtcaacagtgctgagttttcctcagacttgaccctcttcctgtgatttggccaaacgctttgtttcaacacaggtctgagcaacatcttttgcattgtcctgctggccccatctgtcttgttctttcttatagagctcttcattgagagctcatttggtgaattctccttccaaccagcttcccctgttgtcctctgtccttaccaatggggtcatgggccagaaaaccaataaagctcttaatcagagacactgtgcagcaacagtagcagctggccggtccaaacccatagattctagtatggtaagatatgcaaaagatagtcaacggggagccctggtatgagacttgcttgcatgctcacatgcagcctagcttttctgcttttatttattaatttattctggttaatttgttattgcgatgttgaggctctgtacatagtaggcaagcatgctaccactactcctaaccccttgcggtggagtcaggaaggctcctgtctattagctgagcacaccctcagtcccacaggtggattttagacaggactttgtcatcaagccactactccctcaacccctatctcctaggagcattccactgctaagccattatcccaatgcatggaatgacttttctaagtttctgtggttcagcttccactgtccctacccatgtggcccatctctccagactcagtgtgggaaacctaagtccctcctccactgtccagctactttgagtcatgtccccacccagagctttcccgaaagaactcacaggattcatttccttgcaaaagtgatagcacggtcacagtgcaaatagttctgtgatctccctatatttaaggcacttcccatatccagggtaaacaagcttgtgggttagcagctgtgcattcggagcaccctggggaaacagccagtgtggcttcccttgtcttggtggttagtgaagaaatactcctaccctgccccagcagatcaggataggaagaccccaagcatccttcaggtccaggtgtgcctgggtgtttaggagcatcctaggattgaaaccaggagctcttttgaaaaaaaaatattttatgtatgtaagtgtatgccttcttgtatgtatgtgcatcaaatgcatgcctggtgcctgtggaaaccagaaaagggcattggatcccctggaactggagttacagactattgtgaacggcagtctgggttcactggaattgaacacgggtcctttagaacagccagtgcccttaaccactgactccaaccctagtcagcagctctagaaagcttctgttttgagaaaggtttttttttgggggggggggtggtttggaccttgtgatgtaatcacaaggtttataggtctagtcctaccgtatctaacccagtgaagggattttttttaatttaaattttattttctaatttttaaaaatttgctttttgagacagtgtctcatataacccattttggcctcaaactactgatcctcctacctttaacccgtgagtgctgggttacaggtgtgtgccacaacctgttttatgctgtgctggagatgggattcagggcctagctatgttcccaacccaggaactcttaagcagtcaagtcccatttgactctggttattactttaacaaagttgttttctgggctggggagatggttcagtagttagaaacatgtactgatcttccagaggtctggagtttgcttctcaacatccatattaggaggcttacaactgcctgtaacccgaggggatcagatgtcctcttctggctcccattgcacccccctcacaccacagcatatgatagataacagagacacacatacataaatgacaataaaatagtgtgattgaattttcaacttgtgtgttttggttcagctaagaactagcaactaggtgatagaatgctttgtacagaggtagattgggacataccaacactctgctcaaacctattcagtataggttgggagggcagggtaggggcagtgagttgggggctcatggtttaagcaaagtaaatcagcaaagcccagcaccataagagaaggaaagggctgcatacaggctgactgacaaactgagcgttcactttctcgtgcaatcttctcatagtatgaaggaaaacaccaagggagagcctgagaggccattttcttgacccctgggagggatgcataggcttttatgaggaccatggttcttgggttctgaatcactaaatcacactaacccagtgcctaacagtgacaactgcaaaagctggaggggaggggagaggggtagggataggagtgctggggagaagggcatggggggggggggaggagactgcatgaaaagggccatgctgagttgtggccagggagaacaagaaccgagggcaccacatgacaatgtccagggagcaagggaggggaggagaaatctcatcctgccggaaatagacatgactacagttaggagaagactcataaattcagggtggcctgatttgattatgacaacaggaagtgcagggaggctgggggtgggtgggcagaatagcctgatccgaggaagtgaattaaataatagggaagacttcacagttgccatggcgttaaaatacctccggccacattaaacgtcttcctcttcttttgcttggttcctgttcttccaacaggctcatgtctctgcagtgtatctactaaactaaatttagaccctccagggcagcgaggaagggaccgtgtagctcagatctctgtcttctcgtactatgggccgcatctccatccatgacatgtttgggtcttttgccttctcagatctgaaaacggtttagattgcatctaatgaagctgccagcacaacttgggagagggaggaaaaggccaaattggaaactgtgtaggaactgccttagcagtaacttcagaaaaatcaataagatgcagataggaggagaataagtataatttccatcaaaaccaaacatgcttccttaagtactatttggttttactagcttttaaagtgtatcgtcttgggctacagttacaatgattaggggctggggatgtagcttaggtggtaaagtgtttgacttaaagtaccagagtctgactcagtcctcagaatccatattaaaaaaaaacaaaacaagaaaaagaaacaaacaaggtaaaagcaaaatacccaaacaggcttagtggcacatgattgtaatcccagaactgggggtggggaaagacatgggtagatgcctggctcagtgatcagctggctaaactaattagtgaaccccaggtcccagagaaagactcggtctcaaacacaaggtgggcagaacctgagaaatgacatcagagtagacctctttcctccatacacatgtgcacacacactcactcatatgaatacatagaggtaactggctcttgcaatctccctgtagagatgcagacattggaggaggcaatcagtcaattgcatattcttgcgtttgtgagacactgggattagaacccaaagagtatgtatactcctttagctttggaagactcagtatggagctgggtggtggtagcacatgcctttaatctcagcactcagaggcagaggcatgtggatctctgagttcaaggttagcctggtctacagagagagttccaggacagtcagtgctacacagagaaaccctgtcttgaaaaccaaggggaaaaaaggacagtattaataaaagatcagttccatctgatatattgactacacatgttgaaacactctcctggactcacacaaactacattccagattgatgtacatatctgagttatgactgacagttaagaatattcatgttgtcatagggcctaggccctgcctgggatgatatgacagactttagaggttccccatggagggcctcaccctccctggggagcaatgaggcttgggggagttggtaggggtgggggaggaggggatggagagggagctgggattgacatgtgaagcaagcttattactaatttaaataaaaaactaattaaacaaagcaaaacacaaacaaaaaaagaatattcatgttgtcatgataagtacaatcctattttgaagatgaatgtgttttgagaatacaagtttctttcctttctttctttcctttttttttttgagacagtgtttctctgtgtagccctggctgtcctggaactcactctgtagaccatgctggcttcaaactcagagatcttgctgcctctggaactggagttacaaatgtatgagaggcactatgtggatgctgggaattgaacctgaggtatctctctagacccactatattttcatttttaaatctctttatctttctgatattagccttgtcactttaggggaatgagatatccacacttctttccattccttaactgtcttggcttacttctgctgaattctagccaaattttagcatgccagttttgctaatagatctttctgaaggcaaactggtcctcccaatctctgtgaagcatctcattattattattattattattattattattattattattattattattattattgtagtgtggtggctaatactgacaacttgacaggaacctaacatcacctgggagacaaacatttctggacatgtctgtgagagagttgctagcctgggttaactgtgcttatgtgtgtatgtgtgggttggtgcttgtgtgtcacagtgagtgtgtgaaagtcaaacaatttacagaagttggttctctccttccaccatgtgggagtagggatcaaactcaggcttggtggcaagagcctttacttgctgagccatcactccagccctgagtagttttctaacttgactgaatagctcttaagcttgactttggtagaggacagtgtcatgtcgcaatgttaagcgattggacaaacctagatgctgtcatctatttcttcctaggatgtactttactaggggcattgccagtttctgtatccagagtgtccttttagttcatttaaggtcctattgattctctttgctgattctatagatccattcctgggaaaaatgtctctggccaaccttctggaatattttccaggcagatttaaagagcttagctcaaatgcttctgtgttcagtatggagggatacaaaacaagtagtcccaagacaggctttgtactgtctccttggcctaaggcccatttatcagccctgccatggcagtgggtcttctgcaagtcatcagccctctttctaatctgtcatctgaggaatcctggctgggatatacttgagctgctcagtagagtggtgtgctactggcctgtagaggtgcctcctccatacttccttgcccctgctgaattctctggaatcttcctcctggacaaacacagcaagaggttggatgcaaaccatggtcattcgtgggaagatatagatgagataagaggtagaagtaattgacatacttcttcctctcccagacagtccctctgaaaatgggggctcagagtttggggattatggtgtgtgtgtgtgtgtgtgtgtgtgtgtgtgtgtgtgtgtgtgttcttgttaataaggccatttttattccaggtaccatttctattgctgcatactctttcaagctttggaagagatttaacctgattaggaagtcatttgacatctctgttcctttagacctcatggcagtcttcaaagcaagggagacttcaaaaacttttcccaggatctcacaactaagacatgaccagtgagacataaactaggactccttgaggcttcaactgccccctctcattcttcataaataggacctggagccctcaaggggttggcaggggaagcaggactaaagtgaggaagggatgccacttagagacagtcttcaatgccccagcagtttgtttcgtaagacttaattctagccaggtggtggtgatgcacacctttaatcctggcactggggaagccgaggcaggcggatttctgtgagttcgaggccagactgatctacagagtgagttctaggacagactccaaagctacacagagaaaccctgctttggaaaaacaaaaaaacagacttaattctaaagattaccttttcaaatctatttataggtgaggaatccagagactcaatgttaaataattcctggggttgtgtacctagtgagaatgggactgcataggtcgtaaaactgaggagacacagagcatagcagtgtagctgtgaagaattcattctagaagatgactgggcaaaggaaaacttctagaagataaattacatgtgtgtctgtgtgtgtgtgtgcatgtatgtgcttgtgtgtgcgcatgtgtatgtatgcatgcatgtatgtatgtatgcatgtgtgtgtgtgtttgagtgtgtgtgcacatgcgtgcactgtacatgctatgcatgcatacatgtggaggcctgagctccgtctaggatgcctttttctacctctacctaataatttgaagcaggtttctcacggaatttgtgagttctctttaggtacacctgaattccagaagagggcgtcagttcttattatagatgtgagccatctaattgaacggaggacttctaaaagagcaaacagccagtgctcttaactgttgagccatctctccagtcccctaagcttagctttttatgtgggtgctggagagtctgaactcaggtccttgtgcttgcaagcactttaccaacttagccatctccatagctttttttcctttttttgacagtgtttcactccgcagccctggtatgtagacaaagctgacttcttctaatttctgtttgatcctcctaagtgctgggaatataggagtgagccactcacctggctttttttcacactaatatttatggtgccatacaagctggccttcagcaggtaacgtaatcataaatgctacaggctcacactgtgaatgttttgctctctattttgaaagttctgggaactttgggaagtaggacctaatttgtggaagtagaccattaggggcagaactttgaggactgtatcttacccctggttttagcctggctctcagcttcctgtctgagagccatggcgtgaacaacttccatggcactctctctcaccatgacctgaacgactcgttgaggcctctgcaccatggtaaaatgataccttctgaaactgtgaaccaaagtggttatttttccccttatgttgcttctggaaagtattttggtcactgagacgtaaaagaaagtgatatagagccacacacctggccacagctggccaaaaaaagtgttgaatataggtacagcttcatggatgcatcccaagtgacctccgtatttgagatgactctctcttctttgagacctcatatttcttgttgcttctgggcatcatttcctttatatgtaatattgaaattccagtaatttctgctccatagagaggagattgggacttaccaaccaaacacaagcaaggcactttacatacatccacacacagggtgagtgtccaggacaggacagtttccattatctttttatccattatctccattatcaccaggctcacattcttcttcttggagtaagagagtggcatttcacaaatcagggccctggatgagaccctccaatgtcctggcacttggggtcaaatctgaattggcacactagaccccacttaacctctttgagctgccctctggcacctggcctctatttaggctttatactccagctacactggcccttgattccctgattaaatttaaattctagcccacatcagagactttgcggacactgttctgtctgcttgggttgtccttctcattgcctcccatagttggtttttgttttagcacagagggtgctacctcagatgggttttgttaatcccattatttaagaataagaccactaccagaatttaaagtcaaatttgaagcaagctttaattaaatattggcaaggtggatgggttctgtccagatctgtacctgtgttcccaggaaatggtctcagtcacattttgctggggcttaagaaggcaaaacccatttcctgaaagatccaatcaggagcaagtatacattctgatgtacttcctggctgcatatctccggcctacaacaatcagggggcaagggtacattctgacatatttcctgtccacatgggattaagcacatccagtgcagatgggttaaataaacttgtttaggtcagtgaaaatatgtggctgttatgacccataaacaatagccgcaagcatttcaggaactatcttgctctgttgggcaaggggcttgcagatcagaggtgttttgtttatttgtttgtttcaaggatctctcaggcatagtaattaaaacttaaaatgtaattttggcactcacagtttccctcaatgtccagccaagagtcacctctacaaacacatattattcaagatttcccttgtggaatttttatcatgacacttgtcattaccttacatagttttgtgtactttttttagtctcttacctggtgtcagtctccccacactctttgcttgccctgttagagatgtcacctgaacacttagaacagggccaggggtctcataggtgctcaacccaccatgggtgataaaggtaatgattaaacttgattcctttctaccacctcagagtgggactactttcccaaggaagaagtcagctagagactttattgccataccccactttccatccccctccaattaggaagaggatttagagcaaaccaaactgaaacacctgtttctcagatcctctctcctatgtaaccagatttgaaaagagaaccttgcaagcctttaacactgatactggcaggctagtcagacagtccttactctacaaagagaaaagtttcctggtgcacactgggaacaatgctctgggtcaggtccacgaaagcctatttaacccacaatgcaaagtagaaaaaaacgccttgaaattctaggaaatgtaacatggaaaatgaatgagaaatatcatttgcatgcttgtcttgaatgttactgctggaggaaagagggaagcgctttgaggagggtggggatgagggagccaggtctctgaggaacaggtcttagtttgcctaaggaaacatgccctcacattcacaagccccagagatggccagaggctggtgccaatgcttgtacccattgaattctagaggctggaatgaacacaagaggtttattccggaacactgagatttgtctgtgcaatgggttgactctcgagctttgtagggaacccctgctggagcactccaaggataaacagttggacagctttaaaaagaacaggttcaggtccgagaaccggagctcatctgaggctctgggtttaatctgcagctcacaaaactaggagtgagtggttgccacacgctgtaatcccagcatttgactggtggagggccacaagttcaaacttcagagcagcgtgggtctcgaccttggtaaggtcacatatcagatatcctgcatatcaaatatttacattacaactcataacagttatgaagcagcaacgaggggatttcatggttgagggaccaggttcagtttgttttcaccatagtttgctacaaaggtatttgattttcgtgctgcatctttgaggcaaaagtttttgtctcttgaaagtcttccgaaagcaagagcaatattctaacatgggggagtgaataaaaattatgatgttgtttttgaggaagtgctctttttgggaaagacctaccaacttggaatgattccagtcaacactttggaaacctctgtagaaatggtcagagacaaagaaagttaagtcccagtccttattgttttcttttgaatgtgtatatgtgtctatctgagtgggtatgtgcactgggagagctagcagaatccagaaggggagagcagatcctctggagctggtgctacaggcagttgtgagcagccggatgtaggttctgggaactgaacctactcctcttccagagcagccagcgctcagactattgagacaactctccaggctctcaatgaagtgctttaaagatcaccaaaacattgctgagcatggtggtacacgcctttaattccaccattcaggagacagagacaggcccatctctgtgaatccagcttaagatagtgacaccccgtcttaaacaacagcagccaccaaggagaaaagctgctaattatcactagcagtgtcagatctggatttagaggccagggtggggatgtagctcaatggtggaacacctacttagaatgtgtgagaccttgggttctatccccagagccaccaaacaaataagcaagcaaatgaataatcaattcaggggacaaatgcaaaaacaagataacatttctgatgacattgccatatttggaatttcaaatgcttagacaggagaaacaatactctcttgaaaatgctgttaaatgattccagaacaggctgtgtgatgattaagatgctaatattatggctgtacatgaagaaatttgaataaaattttcatgagatgtgagtttaaaaaatagcagtttgcctaatgatggtggcgaatgcctttaatcccagcacccagaggcagaagcaggaggatcttgtgagttcaaggccagcctgttctacagagtcagttccagaacagccaggactacacacacacacacacacacacacacacacacacacacacacacacaaacacatatatcccgaggagcctatcttcctgtacccacagcatctacttaggtcattaaaggtcattgcttgtccctttgagccaggtccccatagtgctaaggaaagcagtcaggctgatactggaaaatcaaagttaaaattgcttcacttggttcatgagccagcaagtcaaacattagtaatgaagaaagtgtcagcagaaggtatgtcacaacagtgataactgcaacagtcacacactagaaacaccgtaaatgactgtctttagtagaatgagtaaattgtggtatgtctgtacgatagaatactagtcagtagtgaagacgaagcacacatctcagcatgaagaaatcagtcttatgagagatggaaaccatcagtgcaacaccactccttgttgtaatgtgtgttttaaaatgaggctgaagacatgactctgtagtcaagagtagcattgatcttgcagggacccagattcagttcccagcacctatgttgggcagctcacaattgcttgtaactccaattcaaagggaatctgatgtctgtggcttcctctggcacctacattcacaagcacataccaaccccagacacacataattaaaaataataaaagttaaataaacagcatactaaatattaatgtggtttgaatgtgagatgtctctcctggatgcctatgtttgaacgcttggtcccagttggtgagttactttaggaaggttgaggaacatttaggaggtggagcctagctacaggaaatgagtcactgggggagggccttatgcattataacctggccctacttcctgttcatgctctacttcctgaatgtggaggccagttaaccccctgcacctgccaccatgccgagcctgcctgctgtcatgttttttccccaccgggaggaactgtacgcctctggaactgttagccaaaataaactgttttcccccttaagtcgtttttgtcttgtgttgtagcacagcaatgagggagtaactatgacaactacaggtatttgactttttccatgtacatccctaaaagttgatatttccagccaggctaattaaaggaagataatgccattctaaaaccagaagtcaaattctgtaagtcacttctttgtttgggagacacaggtgtcctatttcaatagcagtttgtttctgaaagacacagagcccacgggaggaggagcaggctctgggactatcacggtagctgtaccttctgggaacttacttgtctctccgtgttttatcagatggaaaaaatagaaacagtcacatttttaaaaagtcattttataaggtcttgttgtataattgggttgatcctgaaccagctatattgactagaagagccccaagcttttagtaatcccctagcctcaggtttctgagtattgggattacatgtgtgcgccactatgtcaatcttcctgcaattgtacaaaaaaaaaaaaaaaaaaaaaaaaaaaaaccaaaaaaaaacccattggctgagcttttgtgttaatgttcttttcaggctatccggttcttccagaaaccttttctatagtattggcagcttcagggccagatgactgggcaatcacagccaagttcaaacccttttcaaagctgtctgatttcttagtcttacttggtcatgtctgcctcaccctgagatggaggtgattaggatgtctgcttcactgggtaacagagaacattaaatctgcctgtaaatccagaaataattgacagccattattattattaattattgttattgttactttattcctgattttgtgtggtggggtctcatgtatcccaggttggcctcagactcactacatagctgaggatagccttgaattccttatcctctaacccccactgcaccaccaatgagataagcttacagctgttcataaccattgttggcctgatttatcatttgtaagatagatggacccaaaccaaggcctttttcataaaaaaagcaacggttatgtctttgtgtgtgtgtgttcatgtgtgcacaccaccatgcctggtttatgtggtgctggaattgaacccaggtctttgagcataatagacaagcactctaccaatgagctacatctccacctttgattaaggttcttgagaaatgttttaggtgactctgaggatgtcccccttctttggagctttgtaagtagactaactctggcaggactcaggttgaactttgggagctgaatggcatcatccctgcttcaaaagttctctatttttcttttggactttgcagttgagttatagtaacgggggtgcgtggggagaaggggcactgcatgtgagtctggtcttcatccttcaatgattccacaaatccactatctggttttgaaggctctggattctttgatggagtggttgtcactcaataacatagcatatcaacaatgaatgttctagaccaggtacagactcaggtaatttgttctctgagcctggtttactatgcaaaagaaaactaaaaacaatagaattctacattgcctgtagccatggacatagaatgtgtgtgttggggattaacactgagccagttcagtcagctgttaagtcccaagcatccttgattttgatgtgggccaagtacatccttacaggggagagttagttactcttttatctttcctttaatagatcggtagtaaacacccagatgcagcaagggatgaatagtgaagcagcagctctggttgactaggtttccctaatgtcagcaaggtgtacctgattgggaagcccagtggcttcttgggtgggggctagtgctggcggagagattgttcaggaggtggcagggcaactgatgcccttcctagtgactccatagtttatcttcatttgttagaccctgtacccttatttgaggttcccaaaactttcaccaaggtagccatggagtaattgagaatcctgaaaaaccaccgtttctcttcctctgccttctcagagtcaaaagaacaaaccaagagtcaagtggcccaagttgccttgatggtgccccgttaaccactaggttatgcatgggcagaagttagcggtgggtctttaaagtactagtcattgtcgtatctttccaggtccagagcaggaggcagagacctaactaaggaaggccagctctgtctgaggtctccaggctcattagaggatcccacctaccagtgtctaatgaaggagagctattgtcatgcctgttgcacacacagcgatatcaagctgctgaaagctgcagcagcaggtccggtggtcacgtggtgaattagtaactaacacaggaaaaggggccagcgttctggtccttccagtttggctgcctctttaaatcctcaaatccagttatagcctggggctgtgggtgtgaacaggttccattactaggggaaaggtccctcattttcccaatcgtctactgcaaacctgctttttaatttcagggataaaggcctagaaggaggtcgaataccaccctgtccctcaaacacgcaaacgcgtttgttctttcagagtctggtatttcacagcaactgctgatggagcctatatgagctggaactgcagctgctggtgagcaactgtgtgatatttatagctctctctctcctctctctctctcccctctctctctctctctctcctctctctcctctctctctctctctctctctctctctctctctctctctctcgctcgctctctctctctctgtgtgtgtgtgtgtgtgtgtgtgtgtgtgtgtgtgtgtgtgtaaagggatggatttttttccttctgagaagcattgatgccacaacaggaagtgatctcagccagagacaatgcaatcacaggaatcaagtctactgttctcaaacttgagaatgagtcagaatcacctggaggcgtttgttaaagcatactgcatgggagaagatacaggcaggaacatcacaagttcaaggtcagcctggcctacttggaacaacaaaacaacaggacacaataccacatgggctggggagagctcagtgggtaaagtccttcaagcagatgtgaggactggagttcagattcccagtacccacaaaaatgtcaggtgggtgtggtgaccctctgtaaactcagcacttcgaaggcagagattgtgtggtttgaataggaatggtcctccgtagatgcatgtgtttgaatgcttggtcatagtgagtggcactattaggaagtgtggccttgttggaggaagtgtatcactgagggggcaggctttgaggtctcctatgcttcagttatgtccagtatggcacacagtctcctcctgctgccttcggatcaaaatgtagaactctctgctccttcagcaccatgtctgcttgcatgccgccatgtttcctggcatgatgataatggactggacctctggaactgtaagccagggtcaattaaatgttttcctgtataagagttgtgtggtcatggtgtctcttcacagcaatagaaacccaaactaagatagagatggttcagtgggttaaatgttaatgatcttttgctgagtttggatgctaaggataatccatgtaagttgaggttggctgtcttcctctgaaggaaccagcttccttttggcagccataacagccgaacacgtgcttgccataaacctgccttggtcacgtagaggtcagatgcctgtctcgtgacaaggaacccatcagaagttagtcactagaaagtcagatgcctgtctcgtgacaaggagccaatcggaagttagctggtggcgctatgctttacgaccctgggtgtgctttacagacaagcacacagcaatgacatagagagcatagcaaccaccctgggagggcctatgagccataacaaccagttgaccaatcaacacagggcaagccctccaagcctggaggcacaccaatcgtgagcctgtgcgtaagcctgtgcgtacccctagacattccccttatgctgccctataagatcttttgggagcctgtaggagccctctttttctagccgtctgccatggcgggtggtgaaagacccgagctaacatggggttagctcgttaaattacaataaagcctcgtgcagtttgcagcaagctcttgaatccgcctggtgatttgggtgaccgcgaacgtggcctgggaccccgaatacttgagttttcgggggtctaacacctctattgctctgagacaggatctctaactggacctggagctcaccaactggctaaactgactggccatggaacccttgaagccctcttgtctctcctcccatcgatgggggaaatgctttcacacctaattttatacctgggtgctacagatctgaactcaaaccctgatgcttggtgtggcaagctccctttaccctatgagccatctctctagcccacaaatgattccttttgtaagaattgcacttttcagggctggtgagatggctcagtggatgaaggtgcctgctaagcctgaagacctctgttaatctaccctgaccatacagtagcagaagagaactgactcctgcaagtgctcctgtgatctctacacaagggccatggctcatgcatactcacacaaagacacacgaaataaaaaaaaacttttaatgtaattaaaaaacaaaaaatggtactttaaagccaagcgcaatgtggggtcaaagctagattgataacaggtagtttattaaagaatagtactcacgcaagggagccagtgaccaggcttgcacaagatgcctgcttgtccactcagccaggcagaagagagaaaagagggggcccgtgtccgcacctcccaactacttaaaccattgttacgtcacccaagcggaagtggtcagtggtacctgtaaacagaatttctccctatactactttcctatgtgtgtgtatgtcaatccattttctcattctcaattttgtgtgttgtagtttccttttttttcttggttacgctagtggattatttactgttgttgctcttttgttgttttgttttgtttttcagtgattcattccttcctttccctcctctgccttaccctacctttccctgtcctttttttcccattgtctcactttcagcttatactggtttagaacaaattctgtagcccaggttggtctctactctgtcctggtttccctaattctggggttacaggcattcattaccatgactagctttgagaggcattcgttatcttaggaaactttgctgtacaaaccttgaaaagataatccacaacaaagacagctggtacaaaacccacataaaattatctctcggcagtcagttcttctggctttgtatacaagttcattacaacaggcatccttgggtatacacaggaggatggattccagatacccaaatctgcaggtgctcaagtctctaacataagttctcatagtatttacctataacctacacacatacttctttatactttaaattgtctcttgattatttaaaatatctcaaacaatgtaagtgctgtgcaacagtttttatgctgtattgtttagagaatatcgataaaacatctgcatatggctcaaccttgtcagtcggtagttggacccacagatgaagaacccatgggtatagatgaccgactttggttttattttaattctgcctttctgtatcctttagattttaaaacttgtttttaagttgaatcatttccttcagattcattctccttaaacgatttttaaaattaaatttatttatttgtgtgtgatctaatggagcacagatggaggtcagagaacagcttatgagagtctgttctttcctttctcttcgtggatcttggggatctaactcaggttgtcagtcttggcagcaagtgctgtataacctgagccatggtaccagcccaacaaatgatttttagaatttggtttttccttttaacacacacacatacatacatacatgtatataaaatctttgattatatcttacagactttaataaatagggttttccctattatttgctaataatctagtcttttctttgttcacggaaatgaaggtgtgagacacaaatgatgaatcatctttaggtcttgctgttctgcgatcttggtctgcgaacgactttgttttctcttagcatctgtggattaaagcaataaagccttttaacaggattcctgtgtcgtgtgtgctccatgaggttaaattacactcctctgcaatttggaaggaaatggaactggaagatggaagttcaagccccaactctgccactttttattggtaaccaaataaataactgtgtaaagctataaggtcgcatcgcattctcttccgtgcaatttgggactgcaagggacatggaattagtttcaattaggctggattaatgacttctaggcttgcttgttagttgagtcagcttggccacgggaactggagatgctgagtacagttctcgtcatggtcaagttgatgccttggcttcctcacattttcttgtttgatgcagaggagaaaaacatccagacaactctggggactcatttttcctcactttttggaagatggaccctagaaatggctggaggggatggcagctggatgccagagcaggttctgtggagactcctcttcctggaggggctgttttcagtcaaaaagcccctgctgcctggttatctggatgatttggcattctctcccccatgcttggagattgtccaggctctttccctggtgtggctgtccttctgtgacagggacttctctaagggctgaaacctctctaggggcttgtaggtaggtcttcctaataaatcaaacaccacaacacatgtctgtccctgttgtgtagcccatacaatttgatgaccttagagacaaactttataaataattgtttcttgtactacccaccacaagcttgatgctatggaaactattccctctcttacatgggggacacctggtgctcagaaaacatgagcaatccccccaagaagcagagacagaggtaaagccccagctgcttggtttggcctaggatttcaactgcagagtgctattccctgtgtcacagacttcacagttttcctgtaggtggtgctaaagggtctgattcagtctgtctatgatgacaagatttcaataaaggaaaacaaagtataaggaacagcttttctcctttgtccaccagtcccacgggggccagcagcagctccggggtaacatgatgatgtcacagaaaaaagatcaacacagggtgatgaaaacatttccttgaggagagatttaattctaggcatgttctgcttccacagaaagtcaaacctagtttcaggaggggaaggaagtgtagagccagaagcaggaaggctgcaccttccatatgaggtcctagtgtgtagttgaagcaaccatgacttctcctcttgtttataaggcattgtgttcatatagctcaattaaaactgtaatgtataattaagaaacacagattagtagatagttatatataataaacttacagtcatgttagtttggttttctagatatgcatatgcagagatatatttcagacagagaggtaatcttcaaacacttcaaaggcctacagaatatggcatttcaagtgtcgtaagaacttagacttttcttgacaatgagacacttctgctccttgcagcaccaattacttgaaaaggatgatgggcactgaaaaagctccttatggagcttgccttctatgtggcaagactagccatttgggcaagaaactgctcctgcctggtctgcttgtatgttgtataaactggacatggaggacccacaggaaagtgactgctaaacttgtcaaaacaagacaggatggcccttcagccttcctgcttcccagaagaaactgccagacattctacaggacacagaggaaaagctgacaaactttgccaccacaaggcagaacagatcttcaaattttctgcttcattgaaaagtctgctgaatactatgggcctataggctgaagatggatgccccaatgttacaccagaactttgggtgactgtccaggaagccagatatctctgtcatctctaacattttggaagttgcttacaatgcacttccagtttacttaagtaatattatattcttctggggtttttgatggagttgaagacagatagttatagctttccttagttatgattagatataaaactttagacgcacaaaataagatagatgatagagtattttccttaattttatcacatacaaatagactaaatattataactgtaattcttacttgataaatttttttatatgtaattttactatgttaaagttaaaaccttctttttcaattagacagaaaaggggtgatgatgtgggatgtccttatgtatactgtgaaaatgtgttgcttttattggttgataaataaagcttatttggccaatggccaaacagagtagggtcagatgggaaatccaaacaaagatacagaaaaaaaaaaaaagaaggcagagtcaaagagacaccatgtagcctccatagaagtaagatgtcagaacattaccaataaaccagttgcatgtggagatacacggattattagaaatgggctaacttaagaagtaagagctagccaataacaagcctgagccatcagccaaacaattataagtaatattaagcctctgagtggttattcaggaactggcagatgggacagaaaacatccaactacattcatgggtaacaaagtaatgtagttctggggtttcccaaatttctctctttctttctttctttctttctttctttctttctttctttctttctttctttctttctttctttctctttctttctatctaaaatcccgagcacaatttcccttcctttctcttctcccatcccttccctgcctaacttcacccaccctgcctcgatccacttttcctctgtttctgttcagaaaggggcagacctcccatggctattaacaaaacatggcatagcaagttgcagtaggactaagcaccttcccttgtattaaggctgggtgaggcaatccaatatgatgagtaagttcccaagagccagcagaagcattagggactgcccctgctcccattgttaagtgtcccacaagtagactaagctacacagcatgtgtgtgtgtgtgtgtgtgtgtgtgtgtgtgtgtgtgtgtctctgtgtgtgtgcctcagtgtgccagtgtagaggtcaaaggacagcttgcaggaggtggttttcttcttcttcttcttcttcttcttcttcttcttcttcttcttcttcttcttttcttcttccttctcctcctcctcctcattctttttttagatttttaaattttattttatttaattaacatttttttcatttattttacataccaaccgtagtttccccctcccccctttcctcctgttatcaccctcacttccatctatcccacttcccatccacccttcctccatctctattcagaaaggggcaggcttcccatgggcttccacaaagcgtggcatatcaaattaaggtaggacagagctcctccccctgcatcaaggccgggcaaggtaatcaatccagcatggaaaggggagcaggttcccaaaagccagctaagcaccagggacaggtcctgatcccactgctaggcaccttacaaacagaccaagttacacagctgtcacacacatacagagggcctacttggtcccatccaggctccttaggttttcttctactcaggttatcaggcctggaagtaggtgcttttaaccactaaggcatcttgcctgcccttcctagatttcttaacactctagttcacagtttgaaatctaggatctatgtatgactttctgtgattccctggcacaactcaagcaaggagagaactttgatctcacaagaccgccccaagtatgaaagaagttttgtctcagctgcacaaatgccttttgaatctatttatttattattctgttcttttttggttcattcttttgagccttctaatatcacctggctccctgagagactgctccgtaagcactgctcatctcaacagaacttcagtaattatgaagatagctctgtttggcatttttgggggatgttccccaaggaaatattaaatcagttttatctctcacagtaaaataataaatgttttctagttataaattagtctcctgacaatttggctataaattcactcagtagagtttggactaagaaaattgagtttatttttaacagcaggtcaaaaagtacttcctcagaacatttatctctaacttttgggaaataatttcatggcattcattcattcattcattcattcattcaaaatttgcccaacaaattttcatttagtgtctaagatgtacaagggcttcttttatgtacaccagtgaacagataaacaagcttcttgtggttctcttgttcttgtcaaaactgtatcttggagctttacatgatgtgtgtttattcatttgtgtgattaaatatatattatttgatttttgttttttatattcttacctctctctctctctctctctctctctctctctctgtgcgtgtgtgtgtgtgtgtcaggggcaggagggtgttgtttgctatggggcatgtggaggtcagagggcaacttttggtgagtcacttctttcctaccatatgagtcccagagaatgaacttgggtcatcaggcttgatggaagatggccttatcctctaagccatctcccaggtctttaaattattttaaaactaatataaaaggacatttaagctacacatactagtagggtaccaagtatgatgaatattgatcatcacatttttttcttctcttgtaagacccatgtggatggggccagtgttgctaatgattgtccatctagttctcacacagtgccattttataaagaggctttcaaatatttgatgaacaaagtttctcaaggcttcatactaggatactgggtctccagtaactgatcctctgagcctatcactagttttcaggcttagaaattactcatgggcattactgtcttgttctaagatttctgtcagtcagtttttggtgaaggaataggaaataaaagtgacggtctagctagggtggccctgagcttagctttcttgtactctcagagctggatcctccatgaactctgggtgaggggcatcacagtagggtttggggtaggccagttagccagctggagaacatggaagaagcctgggcttctgtagtagaaccaggatgaattgacaaggacagagcccctctcccttcattccttgcattgaaactgataaaccagcaggccttgagccacagtggggagaggaacatggtctagagaccatctgagataaacctagagccagggtcctacactacactcagctctcttcgtgcagtcatgctcatgcatgccaaccaatcatggcagagacagatcagacaagcccttgaactggctgcttctctgccatggcgtgggtgatgatgtgaatgagtaagagcttggatggcaacaaagacagaacttgaaacacagctccaatggggcaaacctttggaacaaataaccaaattttggtgctggagttatcttaaattaggtaactcttttgctcccctctaggggaggcaaaccacaattttgtgttgggtcacatccatagctatcctagccatgggttaggcacatctgcttgggtggtgttcttcttaagtcagagtactggctgtgttctgtgctagagaagacaagcccatcagccaggatctgtattaggagaaagttggggagagaatgtgtgaaagaatggagttgttttatttttttttttttatttttttgagatatagtcttgctgcatagtacagactggtggcaaagcccccatgtcttgatttggcctctgtgtgctcccatacccaggaactttgctttctataatcaactttactgagaaatttacacatgatgaagccttagatctcaggaattcagagctgggattcaatgcattcttctgactccaaagtcaagtgttgagtttgttgtattagtggtcttgaacttcggagatcataccagaggtttgcaaaactatttcaaagggtatgtggcttaaagggctttaaagatgagctgctttgctcttccaaacccagcttgaacagtatttctgatcacatgcttttcttgtcctactcccatcaggagatgcccgagttgccccttgatcctgagtaggcctccgtgaatgtctcagctgaaagagttggcaaaagggattctctgaaacttttgaggctggatgcaacaaagtattatagctgacccttgggtttctcttaagatgcttgctcttggaacttggccaccatgagtgaggaggcccagacctcatgctgcatcagagatcctggagactacacttatgatggttcactggaggtcaacagggctctgtgtgtagttgtcattatggctgatccagtacagcaaaaggaagagccatgtagggtaaagctaggtagaaacaaggcacatgcttcttgctggtcaaacatcctgaaaacatacctctgggtgtgcctctgagagtgtctcctgaagggcttaactttggagggaagactcatcttgaatatgggtggcaccattccatgagctgaataaagagaaaccaagtgaaacatggaaatctcccccgccccagtctggactatagataaagtgtgacaagctgcctcacactccatggaaccacctactggacagccatgctttccacaccatcacggactgtagctccttcaaactttaagttaaaataaacccttactttaaattgtttaacatcaggcattgtctttgggttcctattgctgtgaagagataccatgaccatggcaactcttaataaaggaaaacatttaattgggtggcttacagttaacaggttttgtccattatcatcatgggacaaggtggcatgatggcagacatggtgttgaaggagctgagagttctatgttttgatacgcaggcaacaagaagtgaactgtgagacactgggcatggcttgagcataggagacctcaaagcccacccccacagtgacatacttcctccaacaaagccataacctcctaatagcaccactccctatgagattatgggggccaattacattcaaactaccacaggcattttgtcagagaaatgagaaaagatacaaataatttctccagcaaccacttgaaacaacacaggtgaaatactatccacttgggggagtgcataacaatgagtgctcctaaggagcttcctttctactacttacagatcctagaccaggagggaagaaggtgttcaacagtccaggctatatcatttgccaacctccccaaatctcagtaccacaaagtcaagcaaaggccacccttgcacatgggcctaaagatagtcaggtctgccatctcccacagcactcttcccaaatgacagatctgtgagcagaaaggttgtaaagaaaggtagacaagaaaatttagcggggaggtgtggagaggcaaagagttaatggtggtccttgtttggaccaggtgtttccagactttttttttctcttccagacagggtttttctgtatagccctggctgtcctgtaactagcttcatagacaaggctggcttcaaacttagagatccacctgcctctgcctcccaagagctgggattaaaggcatgtactacaatcgcccaactgtgtttccgatttttggtttttttgttcaaagaattgaagaagtgcacacaatcagggaagaatcttattcagaagcagagcaaaagtgcaggtcgcatacactacatgagggcagcggctgagtgaggtttactcacgcatgactggttaccgcttagaacatctttttcttggtccctgaggaggggttggttgctagggatggagtgtaggaggctttttgttttgattgacaggcttggtttatataagcctttgttcactgtgcatatccttttccacggtgcatctgattttagtcatatgcatacccaatcatgcatatgcatatgatgataaataggggagtctccttaaaagtttacttagaggaagcagtttactgtgtgtgcatccctaggttagattgagctactatccccagttcctggatgtattctgggatgtaattggccacaaaagggaagttactaagggttgctaggtagctgtagctctgagtaacctgttgttggttagagaagagggtgcatatagctcaatgcagatctggtcctgaagggataagtgcaatgttcaaaaaagggttatgtgcatagttcaggccaatggggacccagactgatgaccaagcttttcttgtgctagcctgcatgagaaggagcccttcactctgtctagtctgaagattcttaccagctgagagttaggaattcaagcacaactaattagtgagagagccagtgcttataactgcggtgccctctatctccccttgtctgatcttttgaaacagggactcatatagtccaggctgatcttgaacccatacgtagtcaagaatgaccttaaacttctgcttttacttccaagtgggatttcagccctgtaccaccaggccaggcacacagattaattctatttctacctatttaccactataatagtctccaatattccttctaaaaaagaggcataacattcacaagcaagcctgtcttgttttagtaactagtaatattagtacaaagtgcacatgagataattgaaaaaggaaattctatttcatcaagagatatttttcaacaaaacaatacttttggtctttaatagtgcatcagcaaaattcatatatattcatttttttgttgatttgataggtgtcttgataatgtaaaccagagtaaaatttataaatattcagagtgtcaggaaaatttaatttctgggtatattcatggcagagacatatatgaaaatgattcaaaatactgttaaccaaagctgtattatatttgtgtaaacttttactggagaagaggcatggaaagaaaaattcaaggagaaagaagaacaaaattttccaataaccaagaagaacttgttcttgtatttcggaaacagatcatgggctctctcagactgctgtaggtttaacttaccagcaacatttaaaagagcaagctgacatttttatttttaaacatcaatatttgcaacacactaggcaagcagttctcaagccagcttcactggggattttccaggagtgcacattatcaggccccagcccagacctgccaatccagaaaccaagaacaggtgacagtctgtgcttcaccaaggtcccccaggtgatcctcctgcaagcttcacacaggattaccgtgtgaagatgacctcctctgcagcccctttaatttattatgcaggttggtggggttgtttaaaaatatgtgagcaagtctacggtcttaccgaagctcaagcagaaatatccaaacactgtagccttctgcacttcacagtgagaagcctgtcatgaagccaaacccaacgacaacctttccgaaagtgactaaagccacgaggtttgttcgtggcatttgtttcaggtacagatgcattctaactcaggattgaggcatgaaaacagagtgggaaaatgtaactgacctgaaagaaatagcaatattttgaatgattacttgggaccctcccttgggctatcagactattttaaaaagcattccaagaaatcaggactttcccaggagtctcatgatgaagaaagaaaaataaaaggatgtcttggtgctagacagagggagaacttgtcttccaaagaggtttcacacctctgtatatctcctgctttgactaaagcctaaaccttctgtcaggcccccaaagatagacatgggagtcaccagacattcctgttcttttttacaaatggccacattgagtaaattcatctctacatttttccatcgtgtctctagttggcctaatgagaataggctctgaccctaacaactccagaagtctgcagctcattacagcttatactagatagagttccttccttctgaggagggaggatggggacaggcattaagggagatgctggatggcatttgaacgtccatcactgtaggcagtggagcaagaacaaggcccagaggtggaggagtgagtgtgaatgaaggaatggttgggccaggctggaccatgatgcagaagacggtagctagaactaaatttgaatgagaagatgttttccttggctgtggtcagagttggggatagctggaagtgcagtgagtctaagaaacctcagcagatgccaggggagacccctggagcccatctgtgtcctcagaaaggtggctactcactttataatccgaagaggtccctgctgggcatcactgagaagtggagtctgataaccctagagagcaactgttctgaggtagccatagtccatctgttgctttgggttccagccctgggccacgttcaaattcttactgttttgtaagtggaaaccgtacccattgcgacagtgaggtagttggagttgctcaggctgaaggaacccacaaattcctggagaagaatttttgtttctgtttggtcaagggcaatccagggagaaaaggcattacatcatcgaagctgtctctcattggctggccatttactttgcaattgcttagttctgagagttctatgcattgtggaagcgtgttctgcagcttcagtctctggattcaaagcctccaatgtcattaggttacagccatcgagtaagataacacaatgagggggtttttagatgacggaaagcatggaccctccggtggaccgctcggaacactgtgtcgagtcactttggactctgcatcactacatgaattcataatgcaatattcgtgagagacagggataatggaactgtgacaccctctcttctacttggtgtcccatgaaatgggatgcaaataaattgatttttttttaaatcacatagtttcaatgcatagctcctgaaggattcctgtctttgtgagtctcaggtgccatttccactctcattgtcagtcttatttcttgaaggttaataacggaactgatttctcttaaaaaagaaaaagtcacacaattatgttgaggaaatggaggaaattgtcatagttgcttttcttcagactcgaatttgatgttcttttttggatgagaagaattaaaatgaatacctacctcatctctctctctctctctctctctctctctctctctcttgcatttaaatagcagcataattctaaagtgaagttttacaaaatccatcaagtagttccaaccatttgatgagagagagagagaaaaaagaacaaatcttccaagggattttatttgaaaatagccattaggcatgtactgtaataaaaaattttaatggccattttatatttcagttcctagttcatttttagtgaaattacttggtgacaaatggaagctgagtgatccactgggaggcagagcttgcgggtttctgaaataatagagtggcctctggtgacagaatcctccccgggaccagcacgtgctggaaggatcctaccgcagtctccctctgggtctcttcttgctggtgataggagcattacccagcctgctctggggcttggccttctagatgtggtggaggaaaccctagtgctgcctccagtttcctgactgtaagatccccggaaagctgaggcttccaggatcttagcccaggaccgtggccaccccaatcacagaatggaggcgaaagcttgatgcaaattgcatgaggctttattgtagtttaacgagctaaccccatgttagctcgggtctttgatccaccctcaatgtcggatggctagcaaagacagttcgaagctgctgcgtacagatctttatagggcagcgtaaggggagtgtctaggggtatgcacaggttcaggattggtgtgcctccaggcttggagggtttgccctgtgttgattggtcaactggttgttatggcccataggccctcccagggtggttgctatgctctgtgtgtcattgctgtgcacttgtccgtaaagcacacccagagccataaagcatagcaccaccagctaacttctgattgattccttgccatcaggcaggcatctgacctctaagtgaccaaggcaaggttatgccaagcacgtgttatggctgttatggctgccgaaatggggagctggccccttcactgacaacacccagatttcgaatctccggagaccagggacacagggctgcagggcagagagagcccttgttgacctgctctcctcatggagtcaacaccacgtgacttttgtgtttctagggcaaggatgccaagtcccttatggcctcttagcatcttagttcgcaaagagctgatgatacagggggcatttttctcctatgataaatttctaaaaggcaaaccaggttgcaatggtgtccaatggaacccttcggtgaaactgttttgtgagggggttttgtttttgcatcaagagattggggttgatattgtcaagagctaatgtgagggttggagagatgattcagtggttaagagcacttgttgctcttccagggaactgggcttccagaacccctggggcagcttataacctgtaagtccaggtctaggggatatgttgccctcttctgacctctgaggacaccaggtacacacatggtacacacacacacacacacacacacacacacacacacacacacacacaaaagggaaacagtcaaatgcaaaaagtaaaatgaataatttttttttaaagagctaacatggtgatgtgattaaaaccccaggcctttcatttaagctgggttggacttctggctttaatatctgctaatatttgctctcattggtaaaactttctagacttcagtttagtttcctgtaacctgccataataaattcactcctaggcctggtgtatagatgaaatgatatgttacatacataccgtccatgtagtaaatattcacatgaattaactttctttctttctttctttctttctttctttttttttttttttgtttttggagacagggtttctctgtattgtttttgagcctatcctgacactcactctggagaccaggctggcctcgaactcactcgaatccccctgcctgctgggattaaaggcatgagccaccaacgcctggtgaattaactttcttgttttttttaggaataaccctattgtgaatgtgacccatcattgaaaggctctgaattgctgaatcttttcttctctgctgtctaatccggtagaacagacctgaggggtttgggtgaggaacaaaacacttgtggtgttttactgaagacatctcttcctttatttaaaattttcaggctggaataaagcagtgatgtgcccgccctggtgatcaagtctcaggtttctctcatgtcggaggatatggatgcctgactgaaaatgtgctctgaggggttctaactgctgctcccatttccataaaatctctgtctgttgctggaattggaagcaatcttcctgagaagaacagaacagaacatttccaatcccaaaaaaaaaaaaaaaaaaaaaaaaaaaaaattttccaacccaaaaaaaaaaaaaaaaaaaaaaaaaactttctaaagaaatgtttttgctggagacaaggatgaacctgggctgtttctggaatgaggccattcccactcgggtagcacgattcatgcctgaggaggaagagggctttgtgtgtgaactgaaagagtttaggacacagtgtgtgacatttaaggctccagaaagctcgtgttgttggccctccaagtgagtgcaaccagggagggttctttcacaagggagactgtttctccctgttgtggagtttcagagccagatcccaagatggcggatgtgagaggaactccatgagcatcccaggtggagctgtggctctgaggaggcagagaagcgctgcgcactgacaggttcctttaagacagggcttagctggcgtctttactaggacactagtaaagggagggaagggagggaaataaaaaatactttaaaatgttatgctggtttgaataggcctagcccccttaaacttgtagatttaaatgcttggccaccagggactgttactatcaggaagcatggccttgttagagtaggtgtggacttgttggaggaagtgtgtcactgggggtgggctttgaggtttcagaagctcaagccacgcctagtgtcactctcttcctgctgcctctcagctccctctccagcaccaagtctgcctgcatgcaggtatggttcccaccatgatgataatggactaaaccactgaactataagccagttccaatgaaatgttttcctttttgaagagttgctgtggtcatggtgtctcttcatagcaatagaaacactaagtcaaatgcattttaatatagaaaaccaccacacagtattaaatctatactcaccatttttccttctgtaaagccatgcttcttttttaatatttaaaaaatttatttcctaagaatttcctgcaaacatataatgcccttccaaccctctcatacccccatatcttgcccccacatctcactccttttcttctttaaaaacaaatagttttctaaatccaatcagtgctgcatatatgtgcacctgggcgaggttcacccctggagcatacaaggccaaattacttgaggccactcccccaaagaaggggatgatttacagataaggtcccgttctatagctctggatgacttggaaccttccatgtagcccaagcaagccttggagtggcacaccatgtccccaatgaccctgggaggagaattttgatgtcaagatgatggagactgtgaattatgcagatttggctttaaaaactttgttgttgctgtttatattaagcttacttatttatgtgtgtttgtgtgagggggacacaggcttgccatggcacccatggtggttttcaccttccagcatgtgggacctgggggtttggaactcaggtcgtcaggcttggtggcagtacctttatcctctgagacatcttgccagccctggattcagattttaatactgatgaaatgcatttatggtcacaggctagagaagcctgagatttctgactatagagacacagaaacagtctcggaaaaatgtattctttagaacatctcactcaattctctaatttagcgtccattatcattggcttttaatccatagaaactactgaagatttttctggaagcctagtgagcaggaaatccaatcaatcaccaccttacactgctcttcaccacgaggtaactgaaagacttaaaaattagcaaagaaatatagcccagataaggaaactctccaaacagaatgtagggcggcctaacccagaaactaaggccactactatgacttagtgcctggaatttaccagctgccagcaattactcccttacaaggccataagataactgggtaccaagaattcccagatggccaccctccctgaggggctcatgaaggaaacagattgtcccacctgccaatgtgtcaataattaacagttaagggtccctatgaaacaaagagatagctaccatttgctcaggcaagattagttagcacatcctgaggtctgcaggttttacaactggtgggtcaggaggccatctgattcccagccctcccctcaagacaaagggcctcctaggaacctaagactctgttcatgtactcaagggacagagagtcgaggcccctccctaagcttgtggtttttgcctgggggatggggctgctctgtagcctgcatgctgagagggccgtttgtacaaacgtccacctttcattaaagcctcttgctgtttgcgtcaagtttctgcctccgcatggtgactggggtggccacggtcctgggaaaagatcctggaggcctgagcttccaagggtcttacagtaacaagcagctaagtctgtgtgctgagccacaatctactgattgtctggcattgtgcaatggactgtcaaccaagatggcagaatttaggcagaatttttcacttgtcaaaactattgtcttggttcctgaggagactatcctccagcaatagtttacagtcttttaaaacagtttacctgagtggttttcctcactcagccactggtgtccatgtccttcaggacgataaaacattgacctcatagttggccatggtggttcccacctgcaatctgagcatttgggaaggaaagtttgaggtcagcctgagctctacagtgagatatctctcaaaacaaaaacaggtaaacaaatgagagtttacctcaggaatttaaaataagggaaatgctaggattccagacctgagggaggatagcccagggcttagtctcaagggtttctctgaatgagtcttggaagctataggacccttgggctgagctgagtggggaagcatgtgaggctgatcataaggggcaactctcagagcccagagtctgaggagcagcagccaggagaggggaatcaggaactcagaggtcctggatgccaagggaagacactgcattacaaagggaaggatagctcctgtttgcaggctctctagcttttccgggagacattgaaaataactctgcagctgcctaaaataagagtccctcctatttatatgtctcctctttcatgacatggaagaatgggtgatatctgctggaaatcactgtaatatccctcggttacaataaactatttgaagatccctgggggaggaagagccttgtctgctggaagacagggcactcaataactggggataaaaggacataaaaagagcattttattaaaaacacctttcttctctccttccgttctcaacttcgatttccttttccttctttcttttcctccttccttcccctccctctccctcccttcctccctctcttctttatattttgagatgggggctttgctaaattgtccagatcagccttaaactaactatacccaagcagtccctgaaatgataatgctcctccctccattcccagggagctggggttatagatctgtgtcactggctgctgtaacaggtttgtttttggttttgtttttacgtgccaggcactgttctgaggactctataacaacgagtcttttaattctcacagaaacttaaaaacattttttgtttgtttttacattttaaagtatttagttactttgtgggtggggtgggctgctccatcatgtgtggggggtcagaagaaagaattgaagatgcttcactctttctaccatgtgggctctggggatcgaactcaggacgctgggtgttaagtgtcttgacctgatgagtcatcctggggcttatctcacttgaacttttgagcataggtattgtgtttacaatttccaaattaaggaataccaggcacaaagcaagtgactttctcaaggacacagaagaacaaatggcagttttactctggctcaggtactcggcctttacctcagtccttgccccattccaacgtcatctccccaccccccaacccatttctctctaggaaaaaaaataaataaaaaaacaaaaaatggagcaaactaaacaacagggctggggctgtagttcagtgcagagcatgtacctagtattcctgaggccccggatgagttcccagaacaaattcgatgccaaatactggagaattatttcacaaattgtttcatcttccagaaagccaggctattgtaaaaacctgactgggaccattggtgatgtggaaatttgtagacattcggtgaaacctagtgaacctgacaaactcagaagatggctgtttgcattataaaaggattctttggcttcagggatggctcagctgttaagagcacatactgctctcccacagaacctgagttctgttcccagcacccactttgggcagctcacaactgcctgtaactccagctccaggggacctggtgccctttcctggctaacatggacactgaactcacatgcacatagctacacacacacacacacacacacacacacacagacaaacacacacacataactaaaaattaaaaatgagctctgttaaaaaaaaagaggcggggactctttgagactggtgatggtgtttacttctcttgcatgaggccctgggtttgatccccactaatgcatacactgggcatggtgatatgtacctataactccagcactcattggagattggaggactaaaagctcaaggtcatccttgactacataacaaaattggggccagcctgtgctatatgagatcctgtctcaaaaaaaaaaaaaaaaaaaaaaaaaaaaaaaaaaagaagaagaagaagatattttgatttggaaaataatcaaattcctgtaaatagtagcttgtttatttgacaaaatgcttggggtgggtgagaaaactctccaactaaaatgttcacagatcagtttgtcactttgaagaccaaccagaggctctctggcaaattattcctaaaatgcatgtaagcagtgagaaaagacatttgtattcacgacaccctttcaaatcattttacagtgacattcggaaaaatgtgtctctggcatgaagcctagcctgctcgtacacacggctgccacgtgaacagtctggcatggcgactcacaaggcattagaattggaagacagcatggcggggcatgggtggtttcactggctcgggagatgaagcacgtctttttactgacaggcagctagaccacagttctcattacaaacagcaagcggctgtcttctttatgcatgtgtttttttaaagtaaccacttgcttttctttcaaaaaatttatttatttaaagaaacccatttttaaacatttattcattttttttttttttttttttttttcaccatgctgtgcctatagataccaggggatgatttgaaggagtaggttctttccttctgcaatgtggggctcggggattgaactcaggttgccgggtttggcagtaggtgtccctgtctgctgagccatcttgcaggctcacaatttacttttcgatcatgattaaggtttactgtctttagaaagctctacaggtctccagggatggtcagcagtcacttgcaatgttagtttccccaaactaaaaaccatagctgtttacagagaaaagttgtagaaaccagtacaagcccatattcagcatttcataagaacaatttttaaattgaaaatagattcttctctcatataatacaccctgactgcattttcctctccctccacttgtaacagtcctccctccctttttcttcagaaaagagcaggcctccaagagacagcaaccaagcaatataaaacaaaataggagataaggcaaaagcgctcttatcaaaaatggacaaggcaacggaacaggaggaaaaagagtcctagaatcaggcaaaagagtcagaggcatactggctcccactgttagagttcccacagaaataccaagctaacagccataacatatacacagaggacttgatgtagacccatgcaggcaccatgcctgctgcttcagtctctcagcccatgtgagccctgcttagttgattcagtgggctatgtcctcctggtgtcctctatgcccctgactcccacaatctttcagcctccctcttcctcaggatttcctgaggtctctgaggggtgggacctgaaggagccctcctatttagactctctgcagagtgtcatgctgtgggtctctgtgtctgctctcatctactgcctatcgcaggaagctctctgatgaccacaaggcaccaatcatattcgtctttctaggtctgagttacctcactcaggatgagatttttttttctagttgcatccatttgcctgcaaatttcatgatgtcatttttttttaacagctgagtaatactccattgtgtaaatggaccacattttctttatccattcttcgattgcaggacatctaagttgtttctagtttctggttattataaataaagctgcaataaacatagctgagcaagtgtctttgtggcatgatagagtgtcctttgggcatatgccagagagtggtatagctgggtctcgaggtagatggattcccaattttctgaggaaccacccttttgatttccatggtggctgtagaagtctgcactctggccagcaatggaagactgttgcccttgctccacatgtttgccatcatgagctgtcatttgtggctttgatcttagtcattctgacaagtgtaagatgaaatctcaaagtagttttgatttgtatttccctgatagctaagaatgttggttcaacatttctttaagggtttcttagccatttgagattcctctgttgagagttctctggttagatccttaccccattttaaaattggattgtttggtttgttgatatctggtttcttgagttctttatatattttggaaattagctctctatcagatgtgtagctggtaaaacatctttcccattctgtaggctgctgatttgtccaattgatggtgtcctttgccttacagaaaatttcaatttcatgaggtcccatttattagttgttgatcttagtgcctccactatctgtgttctgttctggaagttgtcttgtgtgccaatgtgttcaaggctatttcccactttctcttcaaaaggttaagtgatttatgtttattaatttgatccacttggacttgagttttgtgcaggttgataaatatggatctatttttattctacttgcagacatccagttcagccagcactatttgttgaagatgctgtttttatccattgtataattttggcttccttgtcagaaatcgggtgtccacaggtgtgaggattttcaatgattccattgatcaacatgtctgttttgtgctaacaccattcagtttttattgctgaaggtctgtagtacaatttgaaatacaacagttcttgtagattgttcaggattgttttagctatacagggttttttgtttttgcatatgaagttgagaactgtcctttcaagaaaagaactgtgttggaattttgatggagattgcattgaatctatagactgtttatagtaggatggccatttttattatgttaatcccactgatctatgagcacgggaaatctttccatcttctaatatcttcttcacttcctttcttcaaagacttgatccttttatcatacaagtctttcacttgctagaatattttatattgtttgaggctgttgtgaaaggtattgtttccctgatttctttctcagtctgtcatttgtacttaggagggctactggatattttttagttaattttatatccagctactttgctgaaagtgtttaccatctgtagaagttctctggtagaacttttaaagtcacttatgtgtactatagtgtcatcttcaaatagtaatactttgacttttttctttccaattatatcccttttatctccttcaattgtcttattgctctagttatgacttcaagtagtatattgaagagaaatggagagagagagtggataaccttgttttgtttctgatgttagtggaatagatttgagtttctgtccatttaacttgatgttggctataggcttgttgtggattgactttattatgttttagtatgtcccctgtattcccaatctctctaggatttttatcatgaagaggcattggattttgtcaaggtcttttctgcatctaataaaatgatgattttttttcagttgttgatatggtggattacattgacagattttcatatgttgaatcatccctgcatctctgagatggagcctaattgatcatggtggatcatctttttaaggtatttttgattcagtttgcaaatattttattgagtacttttgcatctatgttcataagggaattttctctgtaattcttttcgttgaatctttatttggtttgggcatcaggataactgtggccttataagttgggcaatgctccttctgtttatattttgtagaataatttgaggagcattgatattaagttttctttgaaagtctcgaggaattctgggctaaaatggtctggccctggcccccgtcttgtgaaactttaaatgatgctttgattgcactaagggttacaggtatatttaaattgcttatcagatcttgatttaattttggtaagtggtttctatcaagaaaattattcgcttcttttagattttccaattttgtggagtatgggttttcaaagtatgtccttatgattctctagatttccttggtgtctgttgttatgcttcattgtttctgattttgttaatttgggtattttctgttcatcttttagtttggataagggtttgtctatcctgttgattttttcaaagaaacaactctccttgtttcattgattctttgtattgttctctttgtttctattttattaatttcagttctcagtttgattatttcttgccttctactcctcttgagtgtgtttacttcttttttgttctagaactttctttcaggtgtgttgttaagttgctagtatgagatatctccatttttttttttatttaggcagttagtcttaagaactttccccttaacaccaattttacaaatttgagtatatggtgtattcatcttcattgagttctagaaagtctttaatttctttctgtcttgacccattttcattcattaaagagttgttcagtttccatgagtttgtaagctttttgtggtttccattgctgttgatatctggccttaatccatggtggtctgatagcatgcagagggttatttaaattatcttgtatctgttaagacttgctttacatctgaatatgtggtcaattttggagaaacttccatgtggtgttgaaaagaagttaattttttgtgtgtttgggtgaaatgttctgtaagtatttgttaggtccatttggtttataatgtcttttagctccagtatttctgtttagcttttgtctggataacctgtccattggtgatagtggggtattgaagtcttctgctatcagtgtgtgacagtcaatatgtgatttaagctgtagtagtgtttcctttacaacaatgtgcacccttttgtttggggtataatgttaagaactgaaatgtcatttttgttgttgttgttgttgttttgagacagggtttctctgtttagctgtgggtgtcctggaactctctgtagagcacactagcctcaaactcacagagatctgcctgactcagcttccagaacactgggattaaaggtgtgtgccaccaccacctggcttaaaatggcatcttgaatttttcctttcatgagtatgtagtgttttctccatctcttttgattagtttggtttgaagtcttttgttaatattaaaatagctacaccagtttgcttcctaggtccatttatttggaatatcttttccaaccctttacactaaggtgatatatatctatccttgatgttgaggtgtgtttctcatatgcagcagaaggatggatcttgttcttgaatccattctattagtttgtatctttttattgggaaattgtgtccactgatattgagagatgtcaatgacaaatgatagttgattcctgttgttggtgttggttgtgatgtgtgtgtgtgtgtgtgtgtgtgtgtgtgtgtgtgtgtgtgtttcccttcttttggttttgctgatgtgagattatttcctgtggtttaatgggtgcacttagcttccaggggttggaattttccttctagtatgttttgtagggctggacttatgattagatattgtttaaatttgactttgtcatggaatatcttgtttttcatgaaatatcttgtttttttttcatctatcaggattgaaagtttttctgggtactctagtctgggctggcatctgtggtctgttagagtctgcaagacatctgtccaggaccttctggcttttagagtcttcattgagaagttgggtgtaattctaatagatctgccctcatatgttacttggcatttttcccttgtagctttaacattctttctttgatctgtatgtttagtgttttgattagtatgtggtggggactttcttttctggtgttctatattctttttgtattctgtatgcttcttttttgtttacttgttttttgtttgtttgtttgagacacggtttctctgtgtagccctggttctcctggaactcactctgtagatcaagatgtcctagaactcacaaagatccacctgcctctgcctcccaagtgctggaactaaaggtgtgcactaccactacccagcctgttctgtaagcgtcttgtaattttgtaagcatctccttctttaggttaggaaaaatttctcctatgattttgttgaaatattttctggacctttaggctgggattcttcttattcctctgtttccattattcttaggtttggtcttttcgtaaggtcccagatttcctggatgttttgtgtcaggagttttttgaccaatatatccatttattctattgactcttcaatgcctgagactctctcttccgtctcttgtattctgttgataaagcttgtctctgtagttcctgttcaaattcctatttccattttcaggtcttgagcagttttattggcttcctttctttaagggatttattcatttcctccaattttttgtatgtattttctggatttctttatgggatttattcatttcctctttaaggacctctatcattttcatatagttggttttaaggtttttttttcttgtgcctcagctatgttggaatatccagggcctgctatggtaggatagctgggctctggtggagacatgttgtcctggatgttattgattgtgcttttatgctggcatctggatttggagtgattataggtctaggtgctgatttctggacaaaactcatttcttccataatttaaaatactatacagcaatcaagcacttggtccattttaaggaacatttagatttagaacaagagtcaatcaactactgtcaccagagggcaccaatgttcaagttgctaggacaactgcaaactatagggtcacagcatcagggaccagaagggtgtcatctggggtctgtgcactggtctcatttaattctgtcagaagactgagttccttcttcagggaaggtctttcctgcatgctttcacggctctgtctagaatttaacaactctgctgccacacattatcaaagtagaccataggttcttccacctcccatgcatgcattgagccctttctgtgtaactagtaaaacagcagtaggcaacacaggcagagtccctgtcctcaggagcttgtacttcaagggatagaatgatttttaacaacccacccagccaaatacaagacagattccagaaagggcagagtaaacgtggtgggaatatctgattggaatgaggtcatggaaatataggatttcctggggacatctgtaacaaattgtgtagctaaagacaaccaaaagtgactgttctctctcacaggttctcatgtagcccaggctggcttctcttctgttacatagcccaggatggcttgtcttctgtgttaactgagaatgaccttgcactctgatcccacagagtgctagggttcacaaatgtgcaggttatgcagtttatgcatttctggggatcaagcccagggctgtgttcatgctaggcaagtactctaccaacagagctatgtcctcagctctgtattccatgtttatttaatgtatgtgtgtggtgggggaggtgacactttgtcacagtgcccatgttaaggtaggagagcagcttaaaggaaaaagttctctccttttatactatgggttctgggtcgttaggtttgatggcaggtaccttacccactgagtcatccttccagcaacccccacccccttctttttggttttggttttctgaaacagggttttttttgtgtgtagccctggctgttctggaactcactctgtagaccagactggcctcaaactcacagagatccacctgcctctgcctctggagttctgggattaaaggtgtgtgccactaccacccagggtcatcttcttatttttaactaaaataaataaagaaataaatatattttttgagagtgagtctcactatatagctcaggctggtctagaactcacactcccactgcttccactcaggaatactggggtcccaggcatgtaccatcatgcccagatcttttaaaggtctgtgaaggacagtgtctgcaatgaaacatccttagacccctcccagagagcttttccacttgtggtgggcccacccactccctctctgtgctgcctttttttgtcttctggtgcccatggtaccctgatactgcctgatggcacttagaactcatcagctgagctgtgtccctcctccaaatctgtctgctgaagccacaattctcagtatagctggatttcaatggggtaggggaatctgtggacacaacaaagcttaaatgaggtcccaagggtcaggtcctaatgctgtaagattgtgtcctcaggaagaaagaccaactccactcccgcccctccctgcacagagggtcatatgaggacacggaggaaaaacaactgtctctaagccaggaaaagttctcacctgaactcaaccttgatgctggatttcagatttcagaaatgtgaggaaaaaaatagtctgctctttaagacacacagttattttgcacaacagccttgtagaatctacagtgtagatggagattgcccacctgcctttctgtataagctgctcctcttcaagtagccacagtaggatattcatgggttcagagttaggacacagaacagcacctgaggtggggagaagcaacactggtgaattcactacagaaaggtgtggaggacgtgacaaaaaaagctgagcccaagtaagggctagaggcaaagagagcagggtatagtgtgtgtttgtggggacctttccaagagttgaaggaaggcccagcgtaagtggaggggtaagtgcaaaggctaagggagtaagtacactacaggaagagtaagactgggctggtgcagaggggtgaagggacaggtcagtggagtcctgtgagccctgtgggccatgagctgtgagccctgtgggcatgggcagggtctgcatcttctcttcaggcagtgtcaagtcttaggatgagttggagtgaagcccaagaactatacagagctcaggggaccagggctacatcttggatccagaatatccttccaaggttcctgttctacaggtttgctctctagacttcggtgagaaatggtgaagcctttaagaggcggggcctaatggacaggtcattgcgggagggcggtgcctttgaagggagctagttggactctacccctatcacctcatgcttccaccagaacgtgctgctgcagtcccaaatgtagagggctgagccagaataagtctttcttccttagatgttgttatcttgtcccaaatgaggtgtctatatcaactgacacacccccatagggactcagggaacatctcagaagaggaagtgtaaagaatgtaggagaatggggagaagagctgggaaatgcctgtttctggacatggcgtggctgttgtactcatggacttgcggaagctgggggtacctgcacagaactgtacaaaatcagccaaaattctggcatagatggggtagatgatctttgggacatgccacttactgaggagctcctggcaactggctgtttccaagggaaggacagtcgtcatttttcactcgtgaccacttgtaggatcccatgtcccaggggatggttctattcccatgcacatacgggctgcactaactggactggcttaatggtaattaaaaaaaaaagatgaagttgggagggggacatgttgaggggatataggagcaattgcagagggaaacgaagcacagttatggccatatttcattgtgtacttgtatgcagttatgaagaacaaagaatttttttaaaaaagtgggttatcttgggtattttgccacaacaatgatgagcttactaagaacaagttagggatattttagaattgactcaggaaaggttggtggcccggaattttcagaggtgcaggaaagaggacaggcacccagagggaaagggtctccttggaaatgtgtgtctaaagtggagttaagagaattggccatttatcagatctgagagggacgagaaaggaaggcctcagcctagtttaaggtttgtgctgaacggggtggtgaaagcacagctggcacaaggaggcagccctgaagctgagatgggagccttaggaagggttagccgaggactctgaggatgctggctggagggctgaactgggagggactaatgatgagtcagtctggggcaggatgactgggtctgagcatgatgactttgcaggagcagctccaggggaggtgtctgggtgcaggcagctgtctgaagccagcaggaagcagcagttaggaaaaagagtgatggggtggccagatttggagttggaagtgaagaagttcaggtcgaaagagagcgggctgaaggaagagaccaggacagagctccagaaaaatgcaagatgaagaaggagaaagagaaggtaggtgcagacacacacacacacacacacacacacacacacacacacacacacacacacagagagagagagagagagagagagagagacagacagacagacagacagacagacagatagagggacaaactattaacaccaagatggagcatgcattatagaaaaaggatggggaattgtttgtagcaggaaatgttgcctgtaggtaagacacactgtcctacagaactccacccagtggctctagtgacagccattttgtcatcctggcttgcaatgagggatccgggagctggggagacaagataactctccaggagaggaaggaaggtgttgggaatagaggagactggggagtgagtgagtgagtgagtgagtattgagtgtgcgtgtgtgtgtgtgtgtgtgtgtgtgtgtgtgtgtgtgtgtgcatgcacactcgcacacataggccaaaagttgatgtcatgtgccatactctattgttcctcaccttagttcttgagatagcgtcgctcacctcttgcttatccagagttcactactttggctaggcaggctggccagcaacccccagatctttgcctccagctccccagtgctggggttatagaagtgcctggctctgcttagctttcacgtgggggctgggatcgaactcaaatccttatgtttgtgtggcaggcactttcctgactgagccatctcccctgcctctggtttgacttacaaggcagtctgttatcgactcctctcattactgtggcaaaatatgtgacagaagacatgatttaagggaagaacttggattatggtttcctagacttcagtccactgcttttactttcgttcgttatggtaatgggagcatatggaggagtgtgttcacttaacgatggacaggaagtagacatgaaagaagggaccagggaccaattccaaccttcacaggcacaccccagtgatctgtttactccagctaagccctgtctcctgaaaggtcctccacctccccaaatggcatcactagtcatggcatcacctgaccctatgggggacttttcctatccaagctgtaacgaaggaaaccaaggagtgaaaatgcgacgtgcttaatgctgatggggagagtctttaggaaagagacgaaagggaagcgggtgggcatgcagctttggtgaaggatctgactggcatcctcttctaggtgcttctcttttcttctgggtgaagtggattggggtgatctgctggaggagagacctgcagtgtaggtagaggcacaggtcaggagagaaccaactccagagaccagggaaggctgagcagtcaaagatgacgtctgagaagttaccggatgtgagctgatcagaaggtaggaagctccaggcctgtggtttcagagaggtgaccatctggtatgacagggtcaagggtgtgtccctgagttcaggcttccgaaagagagagaaaaacagagaagtgaggtgacactggggtggataccaaggtcattgaagattcagataggacttggaaactagcattcaaatggagaactaaaacctttgaggaatcagtaactcacacagactggggttttgacgtaagtagcaagagtcctgtgatgggagatgtccttctgtgttctgtgaatatatgtttctcttattggttgatgaataaaaatgtttcggccaatggataggcaggatttagcctggcaggaagtataggtggggctaccagactaagagaatgccgggaagaggaagggagcaagtgagttgcctgagagatgccatgtagctactgggaaggtaggacgcctgggcattctctggtaagataaggccatgtggaaatacatagattaatagttatgggttaataattaagagagagctatccagtaagaatcctaagccatcagccaaacagtttgtaattaatataagcctcagtgtatttatttaggactaaacggctgagggactggttgggacagaaacttccatctatagacctggaaccaaggcatcagactgaatatgagaacgattttcctctggttgatgaagatttgcacagcctttgcaagggtctgttttcttcagactatgacgaaatgtacttagtcagatgtgctagagtaaggcattacccaaatactaccacatgatccaaccaattgtgtagtcaatgaatgcaacttgcccaaggaaagtcagccccacaagcaaactaagtcaagaatgtcactccaaagtggcacggtttccttttaaaataattaatgtttagttttgattttatatacttctacctagctaaactcaaacccacatgttagctctggtataatttaaacattttttcaggtattttatttctttgtgcatatttatatgggcaggtgctcatgtgtgtggatatatatggaggccagaaatcaaccttgggtgctgttcttctggtgccatctacatgtttatttttctctataaaaagtgatttatttatcacacacacacacacacacacacacacacacacacacacacacacttctactgcaacttttgggagtcaatcctttaactatatggatccctgggatggaactagggttgtcaggcttgatagcaagtgtcttcacctgctgagccatctcactggtccacatcttgtttatttttgagatagggtctctcactggcctggagttgaccaagtggtctagtctggtggtcagtgagccccagggacacacctgtgttcacatcattagtgctgggattacaagtacatgccacactccccggcttctttacttgtgttctggcagtcatacttagaagcccacgttggtaatgcaagcactttaccgactgagcacccggatgggttttaacattataaattggtctgtaggacccattacaagacttcctttcctgggtgtgtaatctagagttggtggaatctctgcctcaaatggtacaccttaaaatccatttctgtcttagtagaatttaaccataatagattttaatatctttattgaagactgatactaatctcacatactctgatttcaaattcaaagtaggcttcctcttgttatctctttcagagggactatttctctattccttacccacttggaaatgtaaacccaaagatcttcttattaaaaagcaacagacttagctggatggaggtggcacatacctttaattctagcactcaggaagcagaggtaggcagatctctgtgagtttgaggccagcctgggctgcagagcaagttccagatcagccagggctacacagagaaatcctgtcaaaaaacaaaacaaacaaacaaaaaaaaccaaaataaaaacacagacttaatagaaccgtgtatttattatgagtgtctacagatgggtcggtatttgaatactggagatgctattctagaaaaactgtcactgggacaagcaattattattagttctaacagataaaacccttcttgggatctcctctgatctcctaaatgaatttctgtttacaagtgcttcgttggtagcaagatatagacttcagagtcattccagaccattagatgagaattcattattccaggctctggggtaacatttgatacatatcaaatttaaaatcatgaagtccccataaggtatttaaaaaaattaatactgttctatgggctgggaagtagcccagagagtctgtgtacttgcatcacgaacataaccaagtgagcaaaacttaaattctaggtagaccagtctaaatccagaatcctttcatcagttgtgataagaatgcatgttgcacacacacatacacaccacacatatgtgtgatgtgtgtgtatgttaataaaaaattttgggacaaaagaagccaaaatggtgagacatcattgtaaagagatctgttttctcaattttattatcagatccccagaaacccacgtaaatgctgggtggcctgtctgtacttctggccctggaaagcaggaacaggggacctccaggacaaactgctactgggattattgctattattattattttgttttttcaagacagggtttctctgtgcatgcttggctatcctggaacttgctctgtagaccaggctgacctggaactcacaaagatctgcctgtctctgcctcataaatgcagggattaaaagtgtgtgccaacaccacttggcttactgagactgcagaataaggaggaagaatgatcaagaatgattccaaacactaatatcgggtctccatgcattagtacaatcacacctgtatgcaccctgtgcctacacacatggaaaagcatgcaaacacaatacttgtacaacacacacacaggcatagaccaaaagaaaatgatgggaaaagaagaaaaaaaagtctagcttgactgagacatcgtgttcaccaactgctacttttttcccccaagacagggtttctctgtgtagtcctggctgtcctggaactcactcagtagaccaggctggccttgaactcacagagatctgcctgcctctgcctcctaaatgctgggattaaacacatgtgctaccattgtctagccaattgctagatgccgcgaccgcctggaccagcaaggatgacgcaacaccggagctcttcttgcaagcagtttattcaggaccttgaacagcgatctctctcctcgggcaagcctctccaagcccttaaataggtatggaccaccaaccctggattgctacgtaggcaccgtccataggtccaacacatacgcaagcgcttacgatcatctggccttagccatatgtggagttgtttttcgaagagagcgctggctttcaggatcgcggagggcgggaggcagcgccatctttaaagcgcggctccacgcagctctctacagctagatattattcagtgtttccattttttttgaaaattaacatggtgacacctttaatctcaccatttggaaggcagaggcaggtggacctctctgagtttgaggccaacctggtgagaccttatccttaaacaaaaataaggtaaaaatagaataggcacaggatttgcactcatcaaccctttattttcctcatttttccacttagccatttatcttgtctgtcttctagaagccacagagattttaaattcttgctagagactgccagcacctgtagcacccttatttctgcatctagttacccttgaactttcatttcttaaatgaaataaacttatttactacataagtaagcttccagcttcccttcctgtccagtggcacctgatttacaaaaagggggactatggttgtttcacttagaagttcctgatccactgacctcaaggtggaggtggaggccactctgagaaggaatggagaactgtaagcacttcttttttttgcaggcacaaaactacacatgtgcattttggaacaatgtcaggcctatttctgagtcctgaagctcctaagatgccagtaagggatgtggaaatgccccatattttttgttgcctggagttaaagtatacataaactggtatatatgattcttaccttattgaagaagggtctgaaatggcacctttctcccaaacatgaacaatacttattatatttatgttgctgtaacaaaacaagttagtgaagaccatagatttatttcttatagttcggagagctgttgaggtcaaggttaaggccaacatactagctgattcagtgtgtggtgaaggcttgtttgctgtttacacagtagcaccagaaggactctgtgctcacatggtagatgacagaaggacaaaagctcatctaattcccctgagtcttttcacacaggtgttgatttccttgatgagagccgggcccttcatgacttaatcagttattaaagggcccctgcatcttaatcctgagtttaaactttggcctacatccaaacaatagggattttctatatacaagatatttcttcatgtgagtttgcgtatttgtgtgtgtatatgtgtacacaggtatgtgtgcatccatgtggaggtcagaggttgatgtcagggaatattctttgatcactgtctaccttatgttttgagacagggtctctcactggacttgaagtgaactgattgtctagactggctagttgtcaaaccccaggggtcttcctttcttcacctcctcgacaatgggattgcaaatgtgataccatgcctggaattttaattgggtgctggggatccaaactctaagtgaaccatttcctcagagccaactacattagatagtcatgttaatatcatgagatgttaaaaaaaaacctaagattgtgtagatataaaagcaatgtccattctaggagcaagagacctgccttttctggctaacctgatggatctaggtgacccacagctatacaatttggccatgctattggtaacatttgccatttttcttggggttgtataaagtctcccagtgactacagttcccttggtggccatttgagtcacagggaagaaaaataatctccagaaagcacagaatgaataatggcagcatggggaagagatgctcatggttatgacccactcacagatttttgaaatataggtcagatggagaggaagtgaaacttcctgttgaagtttcatttatagcatgtgtctggaaattgctaaatgtaatttcttggtgtaaaataaactgcagaaatctgggttgtgtccgtctgctgtatgtttatggaagccattctgtctgaagctgagatgctgtgaaattatatagtggcatgaacagccacaattagtgtaacagatgtgaccctcttctccaactcagaagctgtcaggatctcagcaaccggatccagaaactatctgggaattcctaaaatccatacaatgctacccatgtgaaggacaacatcaacgttttatttgctacacattcgtttgtgtgtcttagtactttctactttccttttttagtgacttaaaaacaataagcatggggctagaatgatagttcacttggtaatgtgttagcattgaggttgagataagaggatttgaggtcctgtcaaatggatgaattccaagtcccagtgagagacccaatctcaaaagtaaggtggtaaaaaaaaaaaaaaaaaaaaaaaaaaaaaagggcgccagaaagatggctcagtggataggatgtctgttgtgggagtgtgaagactagagtttggacatctccaaaccacataaaagacaggcagacaggcgtggtggtcacttgccagcccagtactggggtgggtagggacaggggattctcagggcaagctgaacagccagactagctggaatgacaagttctgggttctgtgagagaccctgcctggataaatccagtgaagaacaactaaataagacacctgatatcaatttagggcttcaatatacatgtgcttacatgtgcatgtgcatgtgcattcccacacacacgttccccccttgtcaatgtacacacacacacacacacacacacacacacacacacacacacacacacacacacccatacatgcacatacacacatacacacacatgcatgcacacacacacacacacacacatgcatacacacacacatacccacacacacacacacacacctggactttcacactcctcctgtgtatatatgtacgttctctcctacaaagcactacccaaagagaaataacatctagaagatttgaattggctgggaccccttgacatctagaggtccccaatggtggtttcacaataaagatgggtttgaggaaaaccatataaatttcttcaatttgatgtgataagcatcacccttgactttgcctacagtacattgcagtgcctggtttaagggagggctctgcaggaactagtgttagcatctggtggcttcctggtgccaggatctctcacctggaaagtgaatttacatcaaaatccatcctagtggccacatatctggttccccaacccttttcttgcctcctgctggagcctgctggcaggcttgtgctgtgggaccttctctatcctcagaaagatacaataggggccgcctctgtcactgctgcctcctgggctctggttcttgggtttagagacaccaccacattgtctgtgtctagagctggggtctgaactgtcctcagagtccccctgccatgatgctgtctgtctctctctttgcccgcctgtccactgcactgaataagtcctgtgaccttagggagcaatctctgtctcagtgttctctatcacatctgagacgctggtctaacaacgcagaagtgctccagaggctcctggccaaaatgtcctctcattggaggctgctgtatttgcagtgaataccctgaagaatgggcaccatatgtgactctggcacaaaacgcacagaatggaattaaaatgggtccttcatacttaaaccatcaaactgtggagcaacttgtgtggaaatctttgggaagaatgtgggagaatgaatgaatttctcttagcatgagagtcagagtcaatgagcactgtctgttgtttgctcccctggacactccagctaatgcagcatcaggaaaagtatctttattgttataattattattgttatcattattattttggtttttcaagacagggtttctctgtgtagccttggctgtcctggaactcactctgtagaccaggctgaccttgaactcagagatccacctgcctctgtctctcaaaggctgggattaaaggtatgcaacaccaccacccagccagccagccatacatacatacatacatacatgtatatatatttttaagatttatttatttattttagggccaagtggtggtgatatgtaggaagccggttcctgcattataatgctgcctgaagacaccaaggtgtgaattacttcacaggcgccgggttatctccattcctttgatctctgcctatcccgtggctcattttagcctgaggagctgaagccattcatagggtaatacgtcccaggcggctggtcagccttttatatagggatggttttcttggttcaatgtctctgctcagtctctgttcagtctaatgcattaaagcttgtctgcagaaggatccgagtgtcctgcgtgtatttcttgctggcgaggaatacagagcgggcgcgggacannnnnnnnnnnnnnnnnnnnnnnnnnnnnnnnnnnnnnnnnnnnnnnnnnnnnnnnnnnnnnnnnnnnnnnnnnnnnnnnnnnnnnnnnnnnnnnnnnnnnnnnnnnnnnnnnnnnnnnnnnnnnnnnnnnnnnnnnnnnnnnnnnnnnnnnnnnnnnnnnnnnnnnnnnnnnnnnnnnnnnnnnnnnnnnnnnnnnnnnnnnnnnnnnnnnnnnnnnnnnnnnnnnnnnnnnnnnnnnnnnnnnnnnnnnnnnnnnnnnnnnnnnnnnnnnnnnnnnnnnnnnnnnnnnnnnnnnnnnnnnnnnnnnnnnnnnnnnnnnnnnnnnnnnnnnnnnnnnnnnnnnnnnnnnnnnnnnnnnnnnnnnnnnnnnnnnnnnnnnnnnnnnnnnnnnnnnnnnnnnnnnnnnnnnnnnnnnnnnnnnnnnnnnnnnnnnnnnnnnnnnnnnnnnnnnnnnnnnnnnnnnnnnnnnnnnnnnnnnnnnnnnnnnnnnnnnnnnnnnnnnnnnnnnnnnnnnnnnnnnnnnnnnnnnnnnnnnnnnnnnnnnnnnnnnnnnnnnnnnnnnnnnnnnnnnnnnnnnnnnnnnnnnnnnnnnnnnnnnnnnnnnnnnnnnnnnnnnnnnnnnnnnnnnnnnnnnnnnnnnnnnnnnnnnnnnnnnnnnnnnnnnnnnnnnnnnnnnnnnnnnnnnnnnnnnnnnnnnnnnnnnnnnnnnnnnnnnnnnnnnnnnnnnnnnnnnnnnnnnnnnnnnnnnnnnnnnnnnnnnnnnnnnnnnnnnnnnnnnnnnnnnnnnnnnnnnnnnnnnnnnnnnnnnnnnnnnnnnnnnnnnnnnnnnnnnnnnnnnnnnnnnnnnnnnnnnnnnnnnnnnnnnnnnnnnnnnnnnnnnnnnnnnnnnnnnnnnnnnnnnnnnnnnnnnnnnnnnnnnnnnnnnnnnnnnnnnnnnnnnnnnnnnnnnnnnnnnnnnnnnnnnnnnnnnnnnnnnnnnnnnnnnnnnnnnnnnnnnnnnnnnnnnnnnnnnnnnnnnnnnnnnnnnnnnnnnnnnnnnnnnnnnnnnnnnnnnnnnnnnnnnnnnnnnnnnnnnnnnnnnnnnnnnnnnnnnnnnnnnnnnnnnnnnnnnnnnnnnnnnnnnnnnnnnnnnnnnnnnnnnnnnnnnnnnnnnnnnnnnnnnnnnnnnnnnnnnnnnnnnnnnnnnnnnnnnnnnnnnnnnnnnnnnnnnnnnnnnnnnnnnnnnnnnnnnnnnnnnnnnnnnnnnnnnnnnnnnnnnnnnnnnnnnnnnnnnnnnnnnnnnnnnnnnnnnnnnnnnnnnnnnnnnnnnnnnnnnnnnnnnnnnnnnnnnnnnnnnnnnnnnnnnnnnnnnnnnnnnnnnnnnnnnnnnnnnnnnnnnnnnnnnnnnnnnnnnnnnnnnnnnnnnnnnnnnnnnnnnnnnnnnnnnnnnnnnnnnngatatgtaggaagccggttcctgcattataatgctgcctgaagacaccaaggtgtgaattacttcacaggcgccgggttatctccattcctttgatctctgcctatcccgtggctcattttagcctgaggagctgaagccattcatagggtaatacgtcccaggcggctggtcagccttttatatagggatggttttcttggttcaatgtctctgctcagtctctgttcagtctaatgcattaaagcttgtctgcagaaggatccgagtgtcctgcgtgtatttcttgctggcgaggaatacagagcgggcgcgggacagtgatacacacccttaatcctagcctttgggaggcagaggcaggtggatctctgtgagttcaaggccagcctggtctacagagcaagttctgggatagcaagggctacacagagaaaccttgtcataaaaaacaataaaaatcaccaaacaaccaaacaaaaaagatttaattttttgtgtatgggtgttttgtatgcatgtatgactgtgaaccatgtgtgtgtctagtacccaaggaggtcagaagagggtgtcagattccctggaactagacagacagttgtgagttaccgtgtagtgctaggaatcgaacacagatctgcaggaagagtaacctgtactcttaaccactgacccatctccagcccctatattctaagtactaagtctttgagatccagttttccactcctagtgcatctcagttcacactagttatgccagaagtgcaaagcagccactggttaaatgtttattgtagtggacatcaagctctgtatggttcatcatcacacaaattctgattcagtgtgccccaattctttagagctgtggtgagagtcagaattgccatggaaacagacctctgggcatgtctgctggggagtttctggatggtgttaactaaggtaggaaggcccaccctaagtgtggcgacaccatttcttgggctggaatccctttctgagttaaacaggaaacaagctgaagagcagcttctctcaccctgcttcctgactgcacacacagtgtgaccagtcgcctctcctggaccatgtattctttgttatgatggactataccctcaaactgtgaagcaaaataaaccctttcttccttaagttcccattgtcaggtttttttttttttcttgtagtgagaagaataactcattcaagtgtttttcaaactcttggattttcccatgagacattgtgttagtttcttttctgtggttgtagtgaagcaccatgaccaaaagcaacttacaaaagagagtttattgggttacagttccaccagagtaagaatctgtcatggcagggagacatggcagtgagtgacaggcagtgagtgacaggcatggaagtgagtgacaagcatggaagtgagtgacaggcatggcagtgagtgacaggcagtgagtgacaggcatggaagtgagtgacaagcatggaagtgagtgacaggcatggcagtgagtgacaggcagtgagtgacaggcatggcagtgagtgacaggcagtgagtgacaggcatggcagagagtgacaggcatggcagtgaatgacaggcagtgacagtgagtgacagacatggcagtgagtgacaggcagtaagtgacaggcatggcagtgagtgacaggcagtgagtgacaggcatggcagtgagtgacaggcatggcagtgagtgacaggcatgacagtgagtgacaggcatggcagtgagtgacaggcagtgagtgacaggcaagtgagtgacaggcatgacagtgagtgacaggcatggcagtgagtgacaggcagtgacagtgagtgacaggcagtgacagtgagtgaccagcatggcagcaggagcagggaactgagaaaccacatcttttcatgcaaatatgaagcagagagagaaaacaaactggatgtggggaaagactatgagatgcttaaatccagctttgagtgatgcattttgtccagcaagatcacacctcctaagcctccccccaaagagccaccaattgggatcaagtgttcaaatactaagcctatgcagagcatttttattcaaaccactacagccatctgtacctatgccagatatattgtaagttacatgcattatgcatagttaacatatatttatccctctaattggtgtggtccattgatgtaattcttttgtcgtattactatgacaattatgtgcattagcatactgctgtgactgtctttttcttcagagcagcgttgattctttctctttgtgtgtctctccttcatctcctattttgtttcaggattatagaaagtgaggtggggcaatcttccttccttagttggttcaggaagggagttcacatctctttgccgctttccagtatgcacatctcacctgggggcacctctgttctctgtgatgaagtccaagttaccactcctgggttcaaagcacaggctctgagaatatgcacagaaggagccaaagatgtcagagggaagcttgaaactgctgagaaagcacctttcagaaaggctttggcaggagaaaagaaaaggaaaacaacccaccccattattttggagactaaagaaaaggatgtaatagcacaatacaaagcacatgcaagaatatggatgtagttttgcacacagccccagtggctctgagatgataatggaagtttactatgggtctgattacaaaggtgatgggctggatagaattagggattaaacctgaagttcccagcccatatccagcaataggaaacttgacaagtcacgtcaccccaagatccttgaaggagcacagcagcaagcttattagggaaagggtgttgggggagttgcccatagccagctagtcaccatggcaccaaggatcagggagccttctaagaggtaatgtccttttctttgttatatcagctggcatcttgctaggggtggtgacttgtcaggaagcagacctgttgctaggcaaccaaggaggctgaggaaattcccctccccagggagacagaatgccaggggcctcaagaaggatttgaatattaacaaacaaacaaaaatgtgctgccttagggaggaaaaaaattcttttaagaagattgattcatagaaaattatgacctgggcatggaagggaaggaaaagaagaataaggacaaagatgaagaaggagcaggtgtcatgttagacacacacacacacacacacacagacacacacacagacacacacacacacacacctcatctatgtatatggaggtgcgtggattgcagcaaacattagattattacttttcttggtgctatgacaaaatacctggtaaggagcttcaggaaatacacactggcttgctgtttaagtagacacagtccactgtggtggtgaagacacaagggtggctttgtggtggcagtgggggtatgcaactgggacttctcgtctccttggatcttggggaaataggaagtggagagagatggatttgggtgttcttaggcttcctcccttttattgttatcagcctccagtttatgagatggtgctgcccacattcagggtgggtcctccctcagctaagcctctttggaaacatcctcacagacacgttgaattgacaatgaaactcaccacacagtctgaggggactctgcaggtgtcaaatcaagcaatgaaccatgaagagagggcagcacaaacctcctgcagagaccaaacttaggtgcttaggcttggtagaaaatgtttttacccaccgagccatctcaatggccatggaatttcttaaaggcttccttttataccatagagctgtgtcgatccagccaatcatgtatctgggtatcagaattcttccagaagaatgggctttctgcccatccccattgtcagctcagttgagagtttcacacatagctggtgactgggcatgcagcaccaactggagttgatctattccgagggacaaaccttaacctagtgagtctttgtaaattagaaagaaattcattttggaatggttcttcagtatacgtgtagttttagcaatgatgaagataaaagcaaatttgcgtactgagaaggatgtctgtcacaattctaacacaatgcctccctgctggggaatgacagttggtaaacactaactagtattaaaagtcagccttctgcaattgaaccatcacatttttataaaagtgaggtttgttttcacagtaaaaacactgtgattcatagcataaatggtcttgagtctgaatgttttaggcagtgctccttggtgtgtggtgtgacagcatgcacagtgtgcacagttcatgctgtgtgtttagatcaagtctgctcccaagtcatgtgatgcaacaccttcaagttctcccagaaatgcctcaaattcattacattgttttctttttttttttttccatctctgtgttcaattatcacctatggtttaagaagcacctagatctgatcttctcaaaggagagctgattctgcccaggaaatggctcatccttagttgaaggagagaatgaatgaaaaaccccagggttcatgtttttaaaggggcattcctaaatggtgactttgtgacagaaagctctgctttcttttccatgtttcagaatttgaggagggacgattctttatttatttaggtttgttttttttccaagacagggtttctctgtgtagccctgggtgtcctgggactcactctggagaccaggctggcctcaaactcacagagatctgccgcctttgcctccccagtactgggattaaagatgtgtctctaatgataagcagaggtttaaggactcagggacagtgctgtacaaattgaatgtaaagaaaaaaaataaaaaggaaaggagggacatgactgcccctaggtacagtggaggagaaagttgtagacatgtggaaaagactagtcagaggcagggacctctgggagagtccagagtgggcatgagtgggctgagctgggccatgtgggagacagggaagggaagggagaaagaagaaagggagagaggaggaaggggagaggtgcagcagccaggaggccaaaggtcccaaaagggaagggtaactaaaatatccggattacatagggaagagcctctgggggaagggaggagagcccaggctagagggtgttataccagtcatactctacaaacagggtgggggctgagggattctgggagagcctggcagcaaggtccagctttgatgtgttaaataggcatcttagccagttgtcccaggcttaaaacttaacacaagccaggcagtggtggcgcatagctttaatcccagcacttgggaggcagaggcaggcagatctctgtgagttcgagaccagcctggtttccaagagctagttccaggacagcctccaaagccacagagaaaccctgtctcgaaaaaccaaaccaaaccaaccaaccaaccaaacaaacaaaaaacccaaaaacttaacacaaataataatttcaggaaatacagttttcaaatgacaatgttttagtgttttagataaaattgtaaaccaaagttcccaggagagaagctttccctaggctaaggattctacaaggctgattgattagaatcctaagattatggagagctgcagtgttgcaggtccaggaccaggttatcctgctctgcctaagagcctgtatccagtccacatccttccaactatcaggtaaaacctctgggatgtactgaaataaccaccagcagcgtttatcagccccatagctatggatgtcagcatctaggacttctaacagtggctccccactttactgtcaccccacctgctatttctaccattgcatttgataaatgctttggcttatgacttactttgttttataattataacagcaatatataactgcttccattttgaacatgttatttggataacctggatccctgctcctaggtcacttagaataaagtctcttcctacctttgaagtaagaagagccaggttttgcattaatgaaaatcaaaggccaaacaaaacaacactggaaagttcatccttggctaagatctagtggagccggaacccacttgaaagtgaccatcctgtaaaataaggtaatttttatgtttgctataatttctgaacacaacaaaaccaaagggtgatctggaaatccttagccagatcagaagaaaagactggaaacaaaccaagatactgttcttctgaacatgctgacaccacccagttttaaagagtgggcatttatattccagttgcaagccaggatagtaattgccttgtttaaacagatactcctagtaagaccacttttctctcttagcagaccaacctgctgcccctaagagagacagcctctgaaggaagatgctcaactgtttatcaaggcaggtcttcccccaaggttaccccactaggaatttgtgagcactcaggcattttaggccatcatgtgctcagagagtggcagaggaagctcgggggaaattctttaactcccgtggaatcttccttaagccccagcattgcagaggccatggtgggctctttggtggctgagcaagcttgcaacagagatcaggggagcccaaaaagattcttttgatcctgactagaatcaagaggaatgaaattctcagtgcttaccatggaattctaagaatctaaactggggtgttaaaagctgatggggtcagggctggagagatggctcactggttaacagcatttactagtcttgcagaagccctgatttgttttttaagtgcctttgaataactccaggcatatgaatgcatgtggtgcatacaaactcattcagacacttacacacatacacaaaagtttaaataaaacaaaactgaagaatagttttgaaaagtatagtatagaaaagtacagtatagaaaagacttgcctttgtgccctgtcctgacacatagatatccaggtccccactgggccaccattctgcctttccccttctgtctctcactgctctagagcttactttatgaaggaaagtgtagccccagtatccagaaacacccttggttttcttgtaatcacctacgatccaatggactcattggctcaggctgtgtagcaaaatgctcagaatgggtgctgtaatcagtaagcttcattttccgttctgaaggctggaagtcaagacggaagggtacaaggataggtggatggtgaggaccttcctggcttgcaaagcactgcctttggctgtgtactcatggaacctcttttctgactttccccccctctcttgtaaatgtctatcaaaggcagcagctttgggctaactgggcaggagagagatggtgaaagaggaaggggccccaaagcaagagtctggccgaagcccctcagcattgcacttgggagtcaagaattccagcataattaacaaagcttgctggtttgcctaatgagggataattttccttttatatgtagagttcaaccaagaatgttaaaatagtaacaaataacatttaaggtctaagtgtgtatgaccaattatggcctatgtcttttatcagctgtaaacctaccgtttttggttttttgttttgttttgttttctggggctcttacaaacaagtctatgaataccatttacagtaaagggtaggtcttaatctccttgtgtagtctttgtgacccacagttataccatatcagattgaaactatcctattatctcatttatgaagaatagagaaaaagtgtagggagttctttagaaacactttgaagaaggctgtgatgtcggctcagtaaacgtgcttgcctgggaacctgagtttgattcctagaacttatgttcaaaataagccccagacttggtgattcaaacttataaacctggggatgtagagacaagtaaatccctggtactctctgcccaaagagcctagactaatgggtatattctaagaaagtggacactgtctcaaaaaagacaagtggacaatgccaaaagaacaacacaaatggtggtcctctcatcttcatttgcacaggcatacatacacacctgctcacactattaatcccactgacagaggagaaagaccactgactcaaattatagccaaagcaaagcaagctttcttcatatacatgggagccagcagggggctgtctcccctaagggcagggttcaagagatcaggtgtgagccagtttctcaagccccttttaaaggacccccctcccccacagcgtatggttacagaagcaaggccaggcagttagaaaagtctcttttggaacaatggatacacaggaacacatgtacaaaaggtgggaaaaaggaagtcttttgaacaatacaatttcaggaacctcaaaaactgatatgactgatgcaaaaacatgtcagtgtgactcttttgaaaaggccatgccccatccttgggttagtacagtcctttacctgagcatgtcttttggtttgccttggcagccagagtcactcccttagccattgcagaatctcttgtgtgttgacccaatgtcacaagaaactgaatgctgccaattggataaatctatcactgtgtttacaaacagatgccccttccctgggaatgaaaatggccaggctaatagaacatagagctgcaggagtgggaagctaaactttccatggagggccactcagcctaatgggaagaggatccacttctgtgaaacccacttgtaggagaaaaaggtccatacattagtggatataaaacaccaagcagccagacctggtggtacctgcctgttaacccaactacttgggatgctaagggaggagagtcacaagatcaagaccttctcaggtttcagggtgagttcaaggtcagcatggacaacttaatgagccactgtctcaaaacaaaaaataaaaaggttgggatattgctcaatggtcagtgcacgctagcatttgtgaaacactaagttcaatgccttatacttcaaattaatacagcaaatgaataaataaacagctaagcatagtggcacctgtcttttatctcagcactcaggaggcagaagcagatggatctggtttacatagtggttccaagccagccaggatacttggtgagagcctgtctcacaaagcaaacaaacgaaacaaaacagaataacaacaacaacaataaacaaataatcttgcaatttagaggtatttccttatcccctcaagctagttattgcaacccacgtgacaccatcaatcaacaagacaccaaaagacttctagaataagggcatggctcaattggccaattggttgcctcagataaaaatggtccatgagatccaggtgcagggtgagggttggacacaatgctcctaattcttagaggaatgtaagaacctgagttctatcacctaactacctgtggctgggtgttgggactctggctgaatatgcctacaggcagatggtaatggtgagagtttggggtctggtttctgagcatacaattgcctttccttcagatgaattttctttctgtattactgttttagagagggatgccacactgtactgaagccagtctcttttctctgttagcctctgtttactctgatggcacacttccccaatgcgctgcactgcaggctttccttcctctcttctcattgcttgagttcgttcacccccactgtcctcctttctctgtggatcacagtggcagctttcttggtggcttccctgcctcaagtcccagcacctccttcaaattcatcataatacaagaccctgtgatcttactcttcctgaatcaattgcattttttttttttttacttgagaggcgttctctccaccaagaacccatactcactattttttcaatcacagtgagtcagttctcagcccccaaatgtaccacacctcacacacacttatgcttttgtgtgttctttctttaaaaacaaacaacaatgaaaccccctccaaactctctctctctctctctctctctctctctgtgtgtgtgtgtgtgtgtgtgtgtttcagaggacaacttagggggtcagtccctgccttccaccttgactgagacagggtctcttgctgctgtctctgctgggctggctgggctgtgatcttccaggaactctcctggcttagtctctcatcttgccatgggattgtcaagattgcagatgtgtgtgttactgactcttgagttctggagataggaacttggcaagagctttgcccactgggccatctccccagccctgccagtgctctttccccctcctcctccccattcatcttcacacagactttaaaaccaagctcatgccacctctctgctcctatccagccctctcatatagacagctaccccccaagtcttcctcaacactcagtgcaaacagttcccatgttaatttcacagaaggcctctaataatgggtttccttgtccatctttgtcaccagaatgtgagttctgtgtctcaactgtcttgagtcctcaggtctcagggcaacacttgacctgttctaggtacacaataaaaagttgtcatggataatgggggctatttcctttgaagaaaaatctgtctaaaccatcttcccattttaaaattaggttacttataggtatttgagttgcaggagtttgttggatactctgggtagcatcctctcagcagacacatgatttgtgaacacattttcccactctgtaggctcagtggccatgtttttgttacattttgtagctctgacctctctctattctttcttactcaagcctcctggcatggtgatttcttgcttatatcttgatggtttctacatatcttctgctagtactagtattgaatctgtgacttttctccttcctgtgacaaaaagcctgacaaaagcaacttaaggtaggaagggtttgtcaccactggaagtcatggcagcagagggtcaggttgctggtcataatgcatccacagccaggaagccaggagagctggatgctggtgcttagcttgctttctctcttttcctgagtctgggaatccatgagcagtatactagccatcacactatcttggatttttccacctcagttaaccagatctggagactgatgcataggcatgcctggttcccacctcagttaacccaattcagagactgatgcataggcatgcctggttgtttgtctccactgtcattctagatcttttaagaaaattgttagcaaatattttaggattgatttacatgtagctgtaggtgtctgtgtgtggctatgtgtcctcctatgtgactgtggaggtcagaagagggtatgagatcctccagagctgggattataggcacttgtgagcctccctatgcaggtgctgagaattgaacctgggttctctgcaggagtagtacttgctcttagtcactgagctgtcttcccagccctgacagtaaacattaaccacctgtgttggctaacctcagttttcaacttgacatctagaaccacatttgagccaggcaggcctgggtgtctgcctgtgcacattagattcattaattttgattagattgactgaagtggaaagccatgccactgtgagaggcaccatgataggctgtacttccccctgtgacccacttttcttcttcttcttcttcttcttcttcttcttcttcttcttctcctcctttttgagatagggtttctctgtataaccctggctgtgctggaacttgctttgtaggccaggctggcctcgaactcacagagatccatttgcctctgcctccagagttctgggattaaaggtgtgcaccaccactgcccggcttccttttcttctttaagttgcttttgtcagggtgtttttattacagcaacaggaaaagacatgaagactgcactgcaagtgtctttatggcttgttgatatttcttctaggttgttgtgatgtgttgtacttttatgtgctgtactgtgatatgggtgttctataacttgccatgtgtatgttgtaatgtgcattatatatatgtgtcttgtaatgtgtgtgttatatgtgttatgtgtatgttgtgatttgctgcattgtggtgtgatttctatgttgtgtgttgcatgtgttgtgttgtgatataatgtggtatatgtcttgtgatgtgatatatgtattgttatgtgtgagttgtatatgttcagatttgctgtcctgtgatgtatgttgtaatgtgtgtgttgtatgtgttgcactgcgaggtgatgtaaatgtggtgcatatcttgtgatgtgtgtgttgcatgtgttgtcatgtgtgtgtgttgtgatgtgctgtactgcaatgtgatgttttgtgacatgttgtgtgttgcaggtgttgagatgtgatgtggtgtgtctcttgatgtgatatgttcagtgtgtgttgtatgtgttgtgatgtgtgtgtattgggtaggtgtgcaggcaggggtgtgccagggaaaagaccttccagtagctacaggggagtagtgaagcgttgagcctctccaccacccagtttgctgctgccctctctctttagaacattctattcagtgacgtgggtgggattaacgctctgccctgtgtcagggatggagagaaaatagaatcaaatgtgggttagcagtaggatgcggaaggaagaaaagctaattcacttatagcctgtcgagagccaaccaagtatcccggtgggagacaggggcagacagaagacttcactttcttaaatagaactctgttttgacattctctttgctgcagctcccccacgcatgtctgtctcaagagcaccagtgagaggcaggagtttgcctctcgttgccccatctggtggcgaacctggagggctgcaggctgttggagccctgagccaggtcaaccccaacctgggtcttctcccaggaccaggagcaagcagaggaagccaatatacctggaggacagcaatgacaaagttcactgggctggagtgagagacgaccggacttaacgtcttatcaatttggtcagcttaggaaattctttgtctttttgtacttcattttcttcttggaaaaaaagtgggttactgtgagattttgtgaagttgtgtcaaggtaaaagcacccagaagagcaggcagtggatcctgtggtctcagtaaaggagtcacccctcttccttgtttccctccccacctccaccctgtatttcccccctaacacgactgtgtatctggccagaagttacttctgctataggcactatagctgggaacaagagtaagaacctgtgtgggaatagtaggatcaaggcatggagccctcagtggatctgggacaccaccaaggtcctgcctttctgcaatgtgaagccttcctggaactttctgtttcacaagaggggggacattctccatcaccttagacatccaggcataggaaattatatgtttctaatttgggagttgatggtgggatttgaacctggggctgtgtgcttgttaggttgttctatattattattattattattattattattattattattattattattattattaccattatttaggtccagggtcactttatgtagctgtagctggtattaagctcatacagatcctctcttcctcttgaatgctggcattaagtgtgtgtgccaccatacctggctgtatcactaatttataaggtcctgtccaggtctgggctattactaattttatgagctaaagcaacatttacaagaacaaaagtcaaaagcacaagtgactgaatatcttgaggaagacaagcattacacacatatagaccttatcatgtgggttaaaggtgagagggagggcaaatgattcctacatattggaaacaacaaaatattaatattttcctctcatggatttttcttaaacaaaacaatagaatggtctcttgacagaaaactttgggatctaggcatgtgtctgcctgcagaaggtggcttttgcaggaatcttgctcttcctgtagctgttgcctctgttccttctagagactattttggaaatatatgactcagctggtgaacattcccaacctggtatgtggaaaatacctcccaggcgaggagactcacacaaaccccgagtcttctccaggggctgcagtgttaaaatctgtgactttgccatggttttggtggactggatttttgttgtttctgttttgagacagggtttctctgtgtaacagctctggctgtcctggaacttactctgtagaccaggctgggctcgaactcacatagatccccctgcctctgcctctccagtgctgggattaaaggtgtgtgccaccactgcccatctattctatttgtcttaactgagttacctgtcatggtccagctttcatcttatcaagttgcattgtcaccagaccacctagtggctcaattgagaaaccagaaatgacacatcctgcctacttccctcttcctccatcgttcacaccaaggtatcctttctgagattattgacctcacctctgctcagagctcactgcccaatgtttctcctttgttccactgtagctgagcagcttgtttgaggtgtggggtatggggtgtggggtgtgtgaagtccctaagttgttaacttgcaatgggacctttacagtgactattctagtgtgacaaatcacacctaaatttagggctggaaacaacacttaactctgctcatgggttatgtgggtcagtgggactggcttgtctctcagctggggtcacccaatggctaggagtgactgcatggtggtcagctagaatcatgggaaaatatcttcagtaggatcgagcagatcctgttagctgttggctggcctttaccactgaccatatacaggggctcttcatgcggcccacacttcatctccagcatggtgctttgagggaggaagctgacttcctacagccaaaggttccatgtttgtgtacgccactgagcaaagcagacgctgtgccagttggtcctggaagtcacacagtgtcacctctgtctagtacagtggttacaagtgagttaaggccactctagactctcaaagctgatgtattcataacatcaaactcacaaggagagacatgttcaagggtgtggagataggttttaaagctgctacagggagattgtccagtaggaggcagggcataggattcgaatcccttctctcctgtcctcccagggtggatgctgtggctgcactgttctgcagaaccattttcccacacagtctatccaaagacctactgagaggctagctggggatgcctgttcagtgaccggttctcacagctcatccgaacagtggcttggcatggacacactgtttttctgcctgggtttctggtccctcattcttcctgctctgttgatagaccacccacattgaagtgttgcctgactgctgcccccagtcccactgatgtgaccctccacatcctccatgccctctaatcccactgatggggtcttccaaacctctttctcatccattgactttttgtgtccattctgacagtccaatggccagggtaccctaatacactttcctaaacagaccccttctgatgtacagtggcaatactgtctcattacccataatgatgtcacggtgactctttttttttttttttcttttttagtttatcgagacagggtttctctgtgtagccctggctgtcctggaactcactctgtattcaaaacgatccacttgccttgcctcctgagtgctgggattaaaggcatgtgccatcactgcccggcatcacagtgagtcttagggcaaacctcctcaccaaattttccagctaaatgtccgtggatggctttgcaagcctcggcaccatggacattgtgagcaggatctttctttgttgtgggccgtactgagcattacaggatattcagtagcatcccggcctctacccactaggtgccagtagcatcccactcctcagctgtgagaaaagaaaagtctctgacattgtccagtgtctagggaggggaactgaccccagactgagtgcctctggtatgaggtaagcatgcttagagtggccctgtgtgggcccatcctggctcctctgccctcccacatctccaggattctttgaccatgacatatcctttccctccttaagcatttttactgctgttcctttttgcctgcactccaacacacacacattctgtctctcacacactcatatacacattcacacactcatactcttttataccctcactcacattcactcttacatacacatgcttgtgtgcatgaattcatgcacgggcacttacacacagcacgtgcacacacacacacacacacacacacacacacacacacacacacacacccctctttgcaagccactcacctagctgacatcttgttgctagtcctcaactgaaatgccacgatgcatcttcctcggcttaggttttcccttgcctgctaagtctactcttgtgtgacaaccactgtctgcctggaccctggaatctctccagactctgcccgactctctgccttgctcctctccattgggtttatgcaaagtcctagcagagctctttatttttattttttaaatcaaggtagtctagaaaccagaggtcaaagtccacagtgaagtattggcttcctcaaaacgttttcaagaaatatagtatctagcacatgtactgctttttatttttttgtcttctcttgttccacacagaccccaacagtagctttcagatatgaagagtttcctggatggcttgttcttggggatgtctctgtggttagtctggtctggtcttgttagttctgggatggtcagggccaaggattcagtcctaacgcttttgtattttcctatttgtggtattaagcaattgtgaatgctgttgcttgtcaaggactcttgtttgttgatctctgaaaacctgcatttttatagattatttagaaatgattccggcagactttgtttctttttcttttctaacggacttgctccaattttgctgacatacatcctcgggaaccctcgagagtgggaacacggtagtaatacctgagagactatagagtggcttggctttaagtggcagctacagagacctggtactccgggcactctcgccctcttgtggtttgacaaaataggttattatgacccacaggacagaattgaaggtactgctcccagtctgaacagaggactccttagtttcctcctcctcctgcaaactaggggtgtaccaagtgtgacgagaagaaagtaagaagcagactcagggagctttgttgggaattccagtcccagatatttttgaggtgagaactgtcagagacagaaattccgagaaggctttgccaaagcctcagaaacaaaggccagaatcatgcacagcctgagggaatcaagaagagtgaacaaaaaggaattaaaaaaaaaccaaaaaaccaaaaagcggtgcctgaccttcgagatccattggacagccccagctgggcctccggtgttaggggaggcccctcccctcccggggctggtgtgtttgtttttcagggttgctttccttccagctggcatctactgggcctggatccggtcggatgggtattttcctgagtcatgtggtaacaggcttgtgttgcaattaactgttgacaggcccatcagcccagatgccggcttagcaccgcatttcaaagtgagggagagctggctgattttgttcattcttaattggccaactttttctgagggctggggatagcacatgacttttttcttttgccttaaacccccaccctctgcagagtcatggagaaaacaacagtgccccacgtttttcttagcgcaattgctatgtgccattcacatgcagatgtcttcataggctacgtagggtgcctagtgaagggattgggcaatgacttcacaggagacaaaataatatcttagtttgcacacaggtgcaaaggaccctttaaaagaaagatccccgccccctttcctgctgttcccctgggtgcagagaggactccccccccatcttctgtcctctctgtgtctctttccttcttttctcttttcttcccctttcctgccctttctaataaaacttatcgcttccgctctgtctgcctagcatgtttgtccccccacctaggtcactctcacctgccaaggaatccgccaacgttccctgaacactttatcataacaaagacaaaataacatgtaagtctgaaagacacactgagcaagaggcactgttttaggctcagagtaatggagcataggcgcttcaggaagttctctagccattcctgtgtcgaaaaatccaagagattcctgagttccatggatgtttatttaactcctttcccccattgaacatgagaccctccacactagattcgaattccagcctactggtgggaggataccggtgggttgagctaagactggctacagccacacttgcctgtggggcagcctcaggtctctttcccatgcctgtctgctcctcatgtctccaccagatacctggatgttcctccaaagaaaacctggactttgctctagcatttttcctgggttacattagtaaggtttctcttctcctcttctcttccttcctgacactgtggagcctgttaaggtggaagcttcaccccagcccctggcatccatataaccagagtctgaatgtcaaggtggaaattccaccgaagctctctcccccatctctctccaaaccctgcagtatctcagcccaccaaatgatgacccctcccctagagatgctcaagactgttagatccctgaaactgaaagtatccagggtcccaggccacgttcgcggtcacccaaatcaccaggcggattcaagagcttgctgcaaactgcacgaggctttattgtaatttaacaagctaaccccatgttagctcgggtctttcacccacccaccatggcggatggctagaaaagacagtttgaagccactgcgcacagatctttatagggtagcgtaaggggagtgtctagggatatgcacaggctcacgattggtgtgcctacaggcttggagggcttgccctgtgttgattggtcaactggttgttatggcccataggccctccaagggtggttgctatgctctctatgtcattgctgtgcgcttgtccgtaaagcacacccagagccataaagcatagagccaccagataacttccgattggttccttgtcatgagacaggaatctgactttctagtgtctagggcaaggtcatagaagcacgagttctgccgttatggctgccaaaagggaagctggttccttcaaagaccactcccacgggtatttaaactgccccccagaaaccagactggtgattttcctggtctccctttcccatctcctctctggggggctgggaggtcatccagaagaggtgtatctattaaacgtgggttttttctaatttggtttgatttggtctgatttgaattgttgcatcagcagagaggcttatctgggtgtagaaacttttcagaatgttccatggacttctttattcctttctgaacaccagtgatgccctgttggtttctatcaacttgttcatcctctgcaaccctactacccagatcttccatctctggattgtagtaaactcagcatagtctagaaatggtacagactaggagtctcgattgtgtttctctgtcagttaaagaattaaaaagccccaaaggatacacactcacatgtagggagacaccctagccccgcccaatagtcttgggacaggtaccaggtggacccgggactcacccataagggcatggtgaaggaaagccggggtgacgtaagggagcttcttaaggtgctgcacgtggggacccggccccttttgttttggccgtgcttgctggggtctataacctagctctcgcctgtgttttgccttggtgtctttttgaataaagagactttaatccgacacgtggcgcccaagaactttacgaccctgaagagccaacgggcacccagggtttaaatagtgatgaagaatcacatgtaaatggtaaaaatgacaaatgcatattttggcaagcttctattaatgataaaaggcctcaattgaaaattacaattaacaataaagttatttcaggcttagtggacactggagctgatgtgactattatcactcagaaatgttggcctaaaaaatggccacttaaagaggccaatgtacaatttttaggaattggaactctatctagagttcgacagagtgttaactcaatggtttgtattggaccggaaggacaaaaaggaatactaaaaccttacgtagcagatattgctataaatttatggggtcatgatttattacagcaatggaatactcaaattaacatccctccaatgtcagatatgaattctagacaatcactagatagtagaaaagatcgggtaagatgccatggaaaatggttaccaactgtccaggctgtacagacactaaatacaaatgacaggccgtcagaggaaccaaaggccctgtcattaaaatggcttacagataaaccagtctggatagggcaatggcctttgacctccgaaaagcttgaggctctagaaaagttagttcaggaacagctagaggctggtcacatagagcaatctaccagcccttaaaattctcctgtatttgtcatcaagaagaagtcaggtaactggagaatgctgacagacctgagagccataaataaggtaattcagcctatgggcgctctacagcctggaatgccattgccttccttaatacccaaaggatagccgatcatagtaattgaccttaaagactgctttttcactataccattacaagaaagcgatagagagaagtttgcatttacagtgccaactcttaataactcacagccagttcggagaaaccagtggaaggttttgcctcagggaatactaaatagccctactttgtgtcaacaatttgtacaacaacctttggaaataattcgtaaacaatttccacaatctcttgtttatcattatatggatgatattcttttagcagattctaatgaggaaactttagaacgtatgtttactatggtgaaggaggttctgcctagatggggtttacaaattgccccagaaaagatacaaagaggagattctattaactatttaggatataagatagacttacaaagaatcagacctcaaaaggtacaaattagaagggaccgttatcaaactcttaacagtcttcagaagctactgggagaaatctctcaattacagacgattattggtgtggaaggacatgacttaaagcattgaaaaatgacactaaaaggtgataaggacttaaacagtccacgaatattatcggctaaagcagaaaaagagctacaatgggtagaaaacagaatattggatgcgcatgtagatcggataaaccttgatctagattgcattctggtcatcttgccatccagagaatacccttctgggattctgagtcaaagggaagacactatattggaatggatattcttgccacataagcagaacaaaaagttaaagacgtatatagaaaagatttctgatttgattttaaagggcaaattaagacttcgtcagttgactgggaaagacccagcagagattatagtacccttaactaatgatgagatttcctccctatggaaggataatgaatattggcaaatagctctcactgactttttgggaacaattagtaacaactatcccaaaaccgacagaattaaattcataaaaaagacagtttggattcttccacgcattgtaagacaaactcccatttctggagttcttaccttctacactgatgctaacaaaacaggtaaggctggttataaagcaggtgaggtaagtaaagtagttcaaagtccatatacatctgtacagaaagcagaattatatacaattcttatggtgcttatggatttaacggaatctcttaatatagttactgattcccaatatgcagagagagtcgtcttgcacatagagactgcagaattcgtccctgataatactgaactaacctcgttgttcttgcagttacaggaaacaatcagaaacagaagtaacccactgtacattatgcatatcagatcccataagggtctgccaggcccactggcacatggcaatgacgagatcgatcgtttattgattggcactgtgctagaagcctcagaatttcataaaaagcatcatgtaaatagcaaggagatgctccataggcaagctggtaagtcgaaaacccccaaacatagattgcataatgctttattaacgctaaactttcttaatgccagtgacagtggacagacagctgtggaaagacactggactacggaaaaaactgctgaactgaaccaaccagtgtattacaaagatgtgctgacttcggtannnnnnnnnnnnnnnnnnnnnnnnnnnnnnnnnnnnnnnnnnnnnnnnnnnnnnnnnnnnnnnnnnnnnnnnnnnnnnnnnnnnnnnnnnnnnnnnnnnnnnnnnnnnnnnnnnnnnnnnnnnnnnnnnnnnnnnnnnnnnnnnnnnnnnnnnnnnnnnnnnnnnnnnnnnnnnnnnnnnnnnnnnnnnnnnnnnnnnnnnnnnnnnnnnnnnnnnnnnnnnnnnnnnnnnnnnnnnnnnnnnnnnnnnnnnnnnnnnnnnnnnnnnnnnnnnnnnnnnnnnnnnnnnnnnnnnnnnnnnnnnnnnnnnnnnnnnnnnnnnnnnnnnnnnnnnnnnnnnnnnnnnnnnnnnnnnnnnnnnnnnnnnnnnnnnnnnnnnnnnnnnnnnnnnnnnnnnnnnnnnnnnnnnnnnnnnnnnnnnnnagggagagcctgggacccaaaatattccataacagatagtcggtcccccatacaccctctcataattgttgtttttcaaggattaccttttccagtacacatacatgtacaagtgaacatttctctgatgacacttatgtttgagtcccatacagccaacaagaaccagcctgacagcaatccctacaagctccggaaaaaaaaattggactacacctccccgactatactggattcaactcactccgtttcgattgacactccaaccagaacctcgagtaatgacttcaatcaagttgaggatttcaacatagatcttcaatcaaacaaatctcatctaacatggactagacataactcattagaggctttccctatactggcattttttttccacagggcccccacatgactatcattgtcccatttcagcaggaagtaacctagaagatgctacacccccgttccccattattgtgtattagggtagtgtaagtctagttaagaatgaccttcttattgtttagagttgggattggaagaaggtgttcaagttagacccaggaagtaacctagaagatactacgcccctgttccccatcattgtgtattaggatagtgtaagtctagttaagtataaccttcttattgtttagagttgggattggaagaaggtgttcaagttagacactttttccacatgactttaagacctagctagaatagacataggatgtaccatagcagattattgtatcttcttgtatttcacccttatgattgttagttttggatattttacactattaagttttaatcctcttttagactagaaggggaattgtagggagacaccctagccccgcccaatagtcttgggacaggtaccaggtggacccgggactggcccataagggtgtggtgaaggaaagccggggtgacataagggagcttcttaaggggctgcacgtggggacccggccccttttgttctggccgtgcttgctgggttctataacctagctctggcctgtgttttgccttggtgtcttcttgaataaagagactttaatccgacactcacacaaggacatttgctcaactatgttcatagcagcattatttgtaatagtcagaccctaaaaataacctagatgtccctcagctgaagaatggataaagaaaatgtggtacatttatacaatggagtactactcagggagggaaaaaaaaaaaacaaaaaacaatgatatcttgaaatttgcaggcaaatggatggaactagagaatgccatcctgagtgagataacccagacccagaaagacaaatgtaatatatactcactcataaatgggtattagacataaagtaaaggacaaccagcctacatacaggccacaaccccagagaacttaggtaacaaagcgagacatacatgaatccaccaagaaggggaaaaagacaagtaaattgggagtaattgggagttttggggggcatggaagaggatgaaaggggagaggggaggcgggaagcagagtggggaaaatgcatagctcagtttaaaaactttttaaaaaagcaacaacaacaaaaattgaaaagcaatgcagggcatggtggtacactcctttaatccccagcttcaggaaggccgaggccagtggatctctgagttcaaggccaacctggtctacagagtgagttccaggatagccagggcttttacacagagaaatcttgaaaaacaaaacaaaacaaaaagcaggaaaaatctggtagcagcagcagcagggaaatctcactcactttagacagaattagcaactacggcaggcatttattgtagcctggggaaacacacaaatgcagctcacacacagagaaaaagaccacttgtgaagcaaacccaggaagctgaaaacaaacaaacaaacaaacaaacaaaaacaaaatccagtctcttgttgaggtgtgtgtgtggggttaagtcctctgtagagtcttccttccctactttagggttgctgaattagaagacaggtaggatggctgactggtccacaactgttgtatgacttgtcctgaccaggccttgaacttgttgagcagcaagtccaacaacaggcttttgtctcaagtcaggagggtgaagaagaagccggtcaccctgggaatttgcactctttattacctaaccatggtccttctccctatctgtctaactcctagtctctggaactcaaataataaagcaagccctggaagctcagtgggtctcagtttctttatctgtaagatggggagtgtgagtaacgtatggctgtgtgtgatgagtgaagcccagtaagggagcctggaaggaggctggaaatctgcccatttgtaccacttcaagtgatgcagatgtctgagaagtcttggtagacagtggctctccaccaggctgtgcatgaggagctgtagagatggctcaggggttaaaaatgtgtcctgctcttgcagaggacctgaattcagttctctgcacccatgtcagctgactcacaactgcctgtaactccagctccagggagtcaaacactttcttctggcctctatgggcacctgcacacatgtgactcacacacaaaaacaaactaaaaatgagtcttctaaaaattcctttgaaaaaaaatcagttgctcagctggaatggatgccaattaaatcagaagttccatgtgtgtggaagtgatcccataatgtgaccaaagttaaacataaaggctttacaggtagcaggtttggtccagtagctaacctctgagccttggtgtagccatctgaaaacagggaataaaatatgcatttagctttttacaaagattcattgagatgattttgtgcctggtcagtgcatgtcagtgggtgaatgttaataccttgtcttcattgttttgttatctttttaagaaatatgtttcttaaagatatattttcttttaggcgcgtgatgcatgtgtgtgtgtgtgtgtgtgtgtgtgtgtgtgtgtgtgtgtgtgtgtgtgtgttcaagtgcaggtgatttcagagggaagacagagatgtcaaatcccctagagttggcattacaagtaattgtgagctatgtggtattatgcccagatcttggagtccctcaaagaccacccaggagtccatatacaaaagcaaagaacctttattcaagctggagcttggaccctccacgtgtccatgagattggagagccttgagctcagttggggtgggatttttatcatagcagaggctggggggaggggatttctaaggttcaggacctctgactgacatttgtctaggggtgtcttggtgagaggggatgggtatattcgggactaaggtacatctggtgatcatatctacaatggctggaacattaggtattttctttggaatattaggcattttctccctttggatgctgattggtccattcctgagtggtgtctgagtggtttcagtttgtggtctttcttggagttaggtgttgccttagggtaaactgaaactcagacccactttctgactggcctctattgagcctatcatggcagctgtgtggccaaggagccttgggccccaagctgccatggaccccacagtggcactggtgctgggaactgaacttggagtctctacaagagcagtacatgctcttagctcctatgccatctctccatgcccctttcctttcttttaagacagggtattctatgtaactcaagacaggcctcaaactcgagtatatggattataagcctgacacccagcaatttactgggagctagtagcatggacattgggaactctgggcccatcctagcacctcagcctgtgggtcccagattttccagtctcttgttgctttgagcctagttgagtttatatatttgactctgtcgacaaccttcagggaacagagtagaatgctcatgacaattctattttaacccatgtaatccagaacattgtccagtttcaacagtcatatttgagactaagtataacattagttagagacaaattataacattagttccatttgctattgttgttgccaaatcaccagaatgcagcatgtcacccactttgtgagccaaacttttgtttaatgtgtggtaatatggaaactggccaccctttgtatgcaggagttctgtgcctgagagggtatgggtattgagtgaggacatgcgtatgggtgtgaatgtgtgctttatgtgtgtctaagagcaggaaagggcatatgtcgccttaggtgtgtgagtgggagtgtgtggagggctgtagtgctgtggggcagtcttcaggaagacttctactacttctcttcatggcttctgggttcctttgtctcatcccctcctaatctttaagtaaacttaagatgactcagtttgagaccttctactactgtcaaaagccatttgaaggaattcaaatgctatttccagtcttctggggggaactcatgtatgtctgcattctgggcctctctgttatgatataacatccttgtcaacacacagggctagtctctctgtcgctattggaggcaggcggccatggggttatggtagcatgagtgggtggtgacgcctatggacaatatattgtttacttacctcatgttatttcatttgcatgtttgaggggccctgtaaggtcacaattgcctttaaagcaaacatgtccatggaaatgtagccactagctctgacccaggggtgtgagtttaggtcacttctcatatctggtacttttccttactgcggtggaatggcctttcttttcctacgttttgctcttttatcctttggctttgacatgacactctggtgcctagtgacaggctaaagcttgctctaaggtgactatctgccccttgcccagggcagatgactcctcaaaaccggtaaaatgccctggtcttctttagttcagttttccccacttaggatgatagagcaaaatgcctccatttctgagaagcaagaaagatatttttgtgttatttagcttagtgttactctaataagattccaaagaaaatcagttaaaagggagagaggacattttggctcatggtctgagaagttttagccgtgactgttgcttgggcctgttttaacacagtacctcagggcaagaggatgccacaaagaaagcctgttggctgggaagtaagggtggggggtgagcaaggtctcactatctcctttaagggttgctctcacagagacctggcctaacttcttcccaataagccccacctctttttggggggggtgagacaggatttctctgtgtagccctggctgtcctgaaactctctctgtagatgaggctgaccttgaactcagagatacacctgcctcttcctcccaagggctgggactaaaggcatgcaccactacctcctggctaggcctcataaagatttgcccaccacctcccagtagcactaggggatggaggtcaggccttcaacacatgggcccttggagaacgcttaaataaatgatggcatattctatcacattgttcctgttcctcaaatttttacagaatgagaaaaaatgggcacaattcctatttcatttacccgagtttttctttaaaacttgagagttggtatgggctttttttgactggccagaacttcctcaggatcatgcagtaaacttgaggcaagtggagagtagccactgtccacttttcaatcaaaaccattgaggtcaccgacagaacctcctctttgattatttctgggcagctccaggaaggagatgattttctgtctctttctctgccacacaacatgttggcagctgggagagctctgccaccatgccctacacactccaggatgatggacaagctgtcatcatcgggaagctgtttttatttttgaaggatagggaggaaagggagaggatgggccagagaacagccaggggttgtgcaatgaaggatgttttcttgagaaaacatttacttcattctaggtatcatttcttttcaccagttattagaattatgcagaaatagccatatgtttgctttgagacttgttttactgcattgcccagacagaatcccatttttttttgctgtgggagtcaattccagggccctgcctttgctaggcaagtgcagtattatggagcaatattcccagagctgtgtctttaggtctgtgtgaccaggtccagcttcccaaatgcttatatttaatgtttccatcttgtaaaatgactttggtgagaaggtgagaagctagtgagtgaaatactctgagttcttacagagccctttgcacactctaagagtgcttagccactactgccagtgtgttgtttgttcttagttacctcatctcagacaactgctaggaatgttaaggttgctgctcagtggtgcatggctagcatccacaaggccctggatttaatatctagcactgaggaaagcaaagagaagaaagggaccacattctaaacaattgatgtgtccttcagaaaaatgtttttcttcttcatccagggaatgttacaacaaactctgtgactcagtaggtaaaagtgcttgctatgcgtacctgaagacccgagttcactccctgtacttcatagtcagaggagaaaagccaactctgacctctacatgggttttgtagctctctctctctctctctttctctctctctctctctctctctctctctctctctctctctctctctctctctctctctctctctctctctctctctctctctctctctctctctcacacacacacacacacacagagacacagatacatgcatacagagagatacagacagacacacccacacactcagatacacacacacacacacacacacacacacacacacacacgcacacacagacacacacagagacacagatacatgcatacagagcaaaacagacagacacacccacgcactcacatacacacacacacacacacacacacacacacgcacacacagacacacacagagacacagatacatgcatacagagagatacagacacacccacacactcagatacacacacacacacacacacacgcacacacagacaaacacagagacacagatacacacatgcatagagacacagacagacagacacacagacagacagacagacacacaacacacacacacacacacacacagaagccagactaatccaagactttctccaggccctaatgaaaaggacaaagggaactttagttaagtgtttttgttcagcagtggacttgccaatgcctggctgacccctgagccagtgccctaaaggagtcaaggttgtggcttctgggacctgactctcccctgggctgtagtcatcagtcctaaagcaagctgtgtctgtgttatctttgccaacattgtctgacttagtttcctgctgaccttggccattattccccctgaaagtactttatatgatgctacgcttcttaataagctttcttggcacaagctgtcagctttatgcacgacctcccagtgctagccattgcttttgtcatttttgtttctcatgcctggtcctcccactcaaaacctcattgtttggcacccttctttctgcgggttcaggtcatatacatacaataaaacatattagaaattaaaataaaattcttaagttttttggagggttttattgactgtacagcaatgttttcgtggaaggatcatgtagaaatttgtctctgcagaagggctataaatgttccatcatgtaactctgcattgttgtataccttcctagaggtggaagctacatgaactcaggattaagccgcctcagagcagatcaaagcggtttctggtgggtggggacagggtcatgacaagactgccatctccatagacaccagggaacctgaggaccctgttggtacaaggtcaaggacatcttcaagccttcttcttcaagcctgagaagtatgagagttagaggcatgacctcctaggcaaacatgagcttcccatccagacagttatacgcagcaccagccacagtagcctgcttggcttttcctacacctacatgtgcttaaaacctcaggaccagcagtaccaacaagtgagtgaggaccaaaggcctgatgtccccaatgaaaaaagagctgagtttcaaaaaaaaaaaaaaaaaaaaaaaaaaaaaaaaaaaaaagcaagcaaatgcatagggctttaaggcatgttaagcttttatttatttttaattttaatttgtcttttaggagctagagttgaggaattgggagacatcagtgggggtgaggggatgtcccaggatttgttcaacaggaagacaataacttagtaggcagcccaagagggccaatctggaatcagtgtgtgtgtgtctgtgtgtgtgtgtctgtgtgaatgtctatgtgtctgtgtttgtgtatgtgtgtgtgtgtgtgtgtatgtctgtatatatgtgtgtgtgtctgtatctgtgtctctctgtgtgtgtctctgtgtgtgtctgtgtgtgtatgtatgtgtgtgtgtgtgtgtgtatgtatgtgtgtgtgtctgtgtgtgtgtctctgtgtatgtgtgtcagtgtgtgcatgtgtcttgtgtgtatatttgtgtctttgtgtgtgcttgtgtctctgtgtgtgtctgtttgtctgtgtgtctgtgtatgtgtgtgtctgtgtatgtatgtgtatgtatgtgtgtgtgtgtgtgtctgtatctgtgtctctgtgtgtgtgtatgtgtgtctctctgtgtgtgtctgtatctgtgtctctgtgtgtgtgtatgtgtgtctctgtgtgtgtgtctgtatctgtgtctctgtatgtgtatgtgtgtctctctgtgtgtgcttgtgtctatgtgtatgtgtgtgtgtgtgtgtgtgtgtgtgtatgtgtctgtgtgtgtctgtatgtgtgtgttgtagggcaggtttggaaaggaacagagctggctctgtgccagcagcccagcaggccttgcctagcttcctggttttctgttccggtgcaaaggttgttactcagccttgaatcctgccttctttttttttctttctcaactctgttgattcaattctgttgactctgtaagggagctagatcagctccacagggtcctaaaagcctatgctcttcagctggcttcctacaaacagttctgtgaaatagaccagggatggcaggcgattcagtcctgctggccgcagtctcccttctctctgcctgtcagcaaagtaagaacatgggaatggtgtgtatgtgtgtgtgtgtgtgtgtgtgtgtgtgtgtgtgtgtataagtgtgatgtatgtgtgtgaatgtgtggtatgtgtgaggatgttgtgtatggggtgtgcgtgtggtatatgtgtgtgtgtgtgtgtgtgtgtgtgtgtgtgagagagagagagagagagagagagagagagagagagagagagagattgctctagtggctctagtgtttgggtttcaggcctgaatttggttagtagtcctgggtgcccagcagggtgtggattgcttagggtggttgtgctctccttccgtgggatgggcatgttccagagattagctctcacagggatgtggtgggcctcagagctctgcatcatttatgatgacagtccacatgcccgtgtggaggagcgttaggaatttcaggcggagatgtgagcacttgagagtggcaatgacaaacatccattaggaatttgcagcaggaaaccattcctgtttctaaacttggttgtaaacttttagtgtgttttcttagagaaactgcctgtggcagatatcatcaaggtaaagctttgcagaatatgcagtttggatcaagtaatgaattctaaacattacaacatctcccttccagggtgactccacaccgcctgtctggttaaatggaggctctgactcccccacagccacagttactcaatttgtggtatctgccctacatgcctagtgaacagagtttcttactaagaatgcctgtttattcttcctgggatgcacgtatccggaaccaggtctgagcgctggggacagtgcaggccacacactgcaggaagcaaaagactgcttatgctcagggacaaagtccagtcttcacatccactcagtggctagcctagcgggtccgctttgtggatgagggaaaaccttagaccttcagacatgttttgtgtatcagcttttgtagaacagagcaggtgtttgcttccaaccaaagaagaagctgggtctaagtgatcactgggctgtgatcctgtaagtgcagagcatccagggacagggctacatgcccctactacagaggctgtctccccacagagagccttttgtgtgctggctgatgctgaggacactgtgaactgggaccagaagctaagcagttcaatggtgagggaggaaggggacaggaagagaagagagtggggaaatgatgtttgccgtaggaaaatgttcacttgtggggagtggagcacagagagacacagacagagagatactgtttaactggctgcttcagacatttgttgtttacagaattaggacaccttgtgccaaggtacaaacaactcagccttgtaagacagacccacccgtatctgtctggtccagccccggagcaggatattctgctcttccatgtgctcagcacagacaggatcctgggtaggaaatgcctccagggtcactggtccttaacactgttcctatcctgaacctctcacctgcagagagaagtgacatccccagggaagggtccatctgtgacagagtcacaatggtggtggtggtggggttcctttcaccatttctagaatacaagcattcccctaccctgggaaagaggaaatatgggcaaaacaaaggtgatcataagaagagaaattcagtctttccacagaacggataaaatgttttattcacacttattgtggtcattgacagccacaatcttcctgaggccctgagccctgagagtataggttggggcttttaccccagaggttggcaccaaacccaaatattccttcccattgtgggtattcacacacctctcccatttaccgatcaatgtcctcacattggctggtgtggcagacaggtgcctactggatgtagttcacagtgttgagagaaactgaacttggttagggttagtgtaacagttaggagttaggggttagggttaggggttaagggttaggggttagtcttaggagttaggggtaagtggttagggttagcagtaaggtttaggggctaggggttagggttagggttaggagtaagggtcaggggttaggggttagggttagggttggggttagtggttagtggttaggggttagggttggagttagtgttagggttatcgactgtttgcttattcacaagcccttttgaagccctatgttcttgtgccactgctcattggtcaatctaggagcacacagccttcattgtttccagtccctaggtgtttccttcagggccatgaaacaaattagaagccacagtaacagcacaggggtgggagggggaacagtggtggccagaaagaccaagttccaagttttttcctaatggacagaatccctcccctcttttggtctcttgtctgaaattacagtgctcagaaaggttgaaaagaatcaatgtccaccttccggattgtttcagtcctaagacagcacatacttaggtgtcccttttcacagtttaactcctatgctacagctaactgggagccaaagcgaagaaaaggagcccataaagggagcccttcctaagccaggctcagtcctgacttcctgtccaagggcaggtgtgctctgaatcaggatgaaaagcccctctacaagtactcaccccacagagactgaaaccacagacttggtatgggattttaaaacagtgagtgagtcagaagtggttgttgagatattaaaatgagaccaagttgtgtttcaggcaacagttaaggacacgaaactgggagcgataatgggaagggaaatgatagactgtgggaggtaattatgaagaaaggaggagatgaaggagctgggagataattcaggtggtaaagaacttgctttgcaaacacaaggacttgagttagatccccagaactcatgtaaaaacaaaacaaaacaaactggacatggtggtgctggcttgcaatcccagtgccagggaggcagagatggttaggtacctggggctcactggccagtctggtttaatttgatggtttctggtaagtagccatggtacccaactatactcacactttgctgatgaccagtgatgtgccatactttaacaccacattcctttcccttgcagtttattttgctttgcatgttggacgaacaagattaaaatacaagattgcagccccggcagtctccggggctccagagtttgagagaatatttcgtgcacagtaagtaatgcttctcacacaggcaggtattgttttttaaccaagttgttctatttaccaataaagactcaggagtcagatgctaaggtgaaaacctgctaggtcagagaggcccaaaagcaaccagctgaccttcctttttggccagagacccagcaagagactgtttctccacatgtctcaaaccaaaaaatgcccatgaatctttaatcctctctactccttcccgtgtgtctctctatcaatcttcctgactactccttattctctatggctaattcctgtgaactagtcgctggctctgccccctgatccaaggttgattttgtttaacatagtcttggggtttcacagtgcaatcacacatcccaaaataggcaggccagccacaaacagacagattctgattatgggaaagagaaatagagaaggccctaagttcatttcagttagtaaccacgacaagtcactctgcacccatctcaggttccgccatcatgaatcgtccagtgtatgttatctacccaactttggtacagatctagtgatctagttggattggcctattcacccaaaaggctgcaacttgggaagagcggtagtgtctctcaagcactgtggattggccaaagggacctctccagcccctgagggttcagtagattcaagtggaactattttataatttcttttcatcttctgccaagttcttcaagaaccatttcctaagatccgaagcatgtaagaacaagctgtcccaagtcacatgagtcctcagtgttttttagcattctgtgctgcctgccttttcagacacacagtaccttctgccataaacacggtgcactttcctgtagaagttagggtaacctttacacatcaccccaaagcctagtgcttgggagagcattgtctttatcaatatttactcattgctgggttctttctttatgtccatgagtaaggttcatctgtattttttcttgcatagttcttgtctcattttggctatttaaaaaattacacttcactttgaattttggttggtaaggcaagcccttgagctgacaacatggcctcttggtcagtctcttgctctcagaagggttttatagactgatcttccccttggcttcaaagtgtacagggaatgcccacaagacaattttaagtaacatcaaaccatacaaggagaagccattcccaccctagttgtctttaaatacctttggtaggtcaagtagcaagcattggtttggtgccagtgtgttttatacctaagagtaaatgtttactttatgccagtgcacagcctggaaacagagtggaatgacaagtcttattacaagtcactgtcccttgtgcctgtcaacactgtgatctcactgatgtttatttgtccacagttttaggccttgctagtcacattattctctctttttaatcccgtagttggtctatagtcactttgctgtgttaaacctggagccagtgtttgtaccattgtaactaagtaaacaatgttggaagtagagctgcatagtactctgtggttatatttccttcttgtgcaggttttatttttcttagggctaataactgcttctttgctgccttaatttcactctcaggcctctatagaattgaggctccctgtgagtattttcagatgaactggaagtctgctggcatcctcttcctgctttgagcccatctgcctgaatcctcctccctttcactacagtagaggatgctcttagagctactgcaaggctgttattctggtcttcctgttgccttcctagaatttgcttatactctctggatttggatctcctgctacctggactacaattctttttgcattgtttttgtctcttaattttagtggagcacatttgttatctttctgttacagtgatcaatacatgagatcagcaacttagagagaaggaagatttattttggctcagttttagatagcatgctttggacattggtggcacatacatcatgcatggggcagcatgtggtggggcaaaccctgttcgcctcatgggcagatgcaaaaaagaaagagtctaggccccatcatccctttcaagggtatatcaccaatgaactttaccctctgactacctccagtctctgaagactacaccaccaactctgtaacacatgggcctgtgggggaactttcagattcattctaggacatgtctaaacacttcctgagaggatctcaggactgtagaattttgaggcttgttctatttggatacagcctacccccagcctcacatcactgatggctgggtaggtctatatatttccatattaaatcattacaccttcagaattgtgagacaattgctccatcactttctagtgactttgggtattgttgacatttgccatgtggtgtgggaacagttgagaggttctggggtgctctgtgccccacagacctcttctgtattacagcatgctgaattctagagcaggcctccttgtggtccagaaactcatgttcttctgtcccagagattaaaaaagtattctcccccaatttcttctttgtgttttcattcttttttgaaacatgctagttgctcttgagctgactctttagttttcttttatcttaagttctcatatttggtgactcttgttctttctggagaatttcccaaatttctactttttaccagctgaaccattttgggaggtcatcattccaaccccaggagttgattttcactctgcttttcccctgccattgttgatgatgttaaatcatatgtccttgggtctcatgggcacagttttccatttggggattacattaatcacttaaaaattgtctgtcattatttctgtttaaataacatttaacaaattttaataatatcaaaccacacaaggtaaatcctacctatttcaatttcccaagtccttatggtcttcatgttcaagttagtatctgttttgaactttggctttcatgtcacacattaaacaaaaatacacattaaatatttatgagtgtctccatgtatagcttagcttgtatcagtgaacaaaccaaaagggtgaacaaaccttacccttttggagtatatagccaaggaggaccaaagatcaccattggttggctttccttgaccaaggtttgtgctttgaaaacctcacatgagagcctgggatgggatgtagccacatgaattggagtggattgaaatttgaactagggtggctgctgtaagcaaggccagcctgaaccacacagtgagtccctgtaaccaagagctggggacagagctcagtggtgaagggattgctttgtgtacagattgccttgggttgcaccacaaaactatactccctaccccaaacaaaaggaaaccacaaaagggactaaacaaccccccaaaccaaccaaccctaacaactgatttatagaaaactagtaagtggtatgtgcacaggctgaaggtggtgcctgtgataggctcatgctctcagactcaaaccatttataacatcaccttgggggagacctcagcttccctcactctacctctgttgaactgagagctgactctgtctgtgtgaggcttccagcaggttagatctgagggccactccttggttctatttcattctcactgtttccacacatttgattctctttcaagttagtgttttctccctccctttttttataactgggctcctttcgtcctagaaacaaagttggacaccatttccaaatatttctctgaagttatttataaaataagtacacaagctcaattcattcatcagaacttaattttttgtttgtttaaccttagtggaagagtcataggattaaaataatatgctcattgccgggggtggtggcacacacctttaatttcagcacttgggaagcagaggcaggcagatctacatgagtctaaggacagcttggtccacagagtgagttccaagacaaccagggctacacagagaaatcttgtcttgaaataccaaaaacaaacaaacaacccccccaaaaaaacccaaaaccaaaaatccaaagcaaaccaaaaaacaacactccccaccaaccaaatcaaacccttataatatcaaggggaatttagagtcaagagatagcttgatggatggtgctggcataactggatgcagacatgtagaagactacagatagacccaagcctattaccatgcacaaaactttagtcaaaatggatcaaagacctcaacataaatccagccacactgaacctattagaagacaaagtgggaaataaccttgaatcaattggtacaggagacagcttcctgaacattacaccagtagcacagacactgagatcaacaattgatgaatgggacctcctgaaactgagaagcttctataaggcaaaggacacagtcagaaagacaaaacagcagcccatagactgggaaaagatattcaccagccccacatctcacagagggctcatctccaaaatatacaaagaactcaagaagttattctccaaaacaccaaacaatccaattaaaaagtggggtatagaactaaatagacaattctcaatagaggattcgaaaatggctgaaagacacatgagaaagtgttcagcactttcccttagccatcagggaaatgcaaatcaaaacaactctgagataccatcttactcctatcagaatggccaaaatcaaaaacaccaatgacagtttatgctggagaggatgtggagaaaggggaacacttctccactgctggtgggagtgccaacttgtacagccactttggaaatcagtatggcgacacctcaagaaaatgggaatcagtctaccacaagatccagcaatttcactcttaggcatatacccaaaagaagcacattcatacaacaaagacatctgttcaaccatgttcatagcagcactatttgtaatagccagaaactggaagcagcctagatgcccctcaaccgaagaatggatagagaaaatgtggtacatttacacagtggagtactactcaggagaaaaaaaaatagaatcttgaaatttgcaggaaaatgcatggaactaaaagaaaccattctnnnnnnnnnnnnnnnnnnnnnnnnnnnnnnnnnnnnnnnnnnnnnnnnnnnnnnnnnnnnnnnnnnnnnnnnnnnnnnnnnnnnnnnnnnnnnnnnnnnnnnnnnnnnnnnnnnnnnnnnnnnnnnnnnnnnnnnnnnnnnnnnnnnnnnnnnnnnnnnnnnnnnnnnnnnnnnnnnnnnnnnnnnnnnnnnnnnnnnnnnnnnnnnnnnnnnnnnnnnnnnnnnnnnnnnnnnnnnnnnnnnnnnnnnnnnnnnnnnnnnnnnnnnnnnnnnnnnnnnnnnnnnnnnnnnnngataacaagaatggagataccataatagagggagacattttaagtttacagagaaattaggcactagggaaacgtctggagatctacaaagatgacaccactaacaatctaagaatcagaggagaggctaccttaaatgccctcccctgataatgagattgatgactgacttatatgccacccgatagccctcatccagcagctggtggaagtagaagcagacacccacaacttatcactgaactgaactggaatccagatgcagagaaggacaagtgaagagcaaaggggtccagaccaggctggtgaaacccacagaaacagctgacctgaacatgggggaactcttgctcctgagactgatagctgggataccagcatgggattgatccagaccccaggaacatgggtttcagtgaggaaaccttggaaacctacgggacttcctgtagtagttcagtacttattcctagcataggtgtggactttgggagcccattccacataaaggaatactccctgagccaagacacacgggggtgggcctaggctctatccccaaggatatgatagacactgatgacaccctatggaaggcctcaccatccagggggagcagaaaggatatgtgataggtagggttttagttgggggggtggtaggggaggatgggagggagaagggaactgggattgtcatgtaaaacaatcttgtttctaattcaaataaaaaaaaaaaagagagatagcttgatggaagggcaaagtggggcagtcctatcccattccctccctgtatttcttctggtattttctattgcactagtcaacttcttgccttgaattctaaggttcatgacaaatctggctaattcagatttcatttgtcatgagtatggcatatagactttttatgaggtacctggcagaactccttgggctttccaagtctttgcaaagccggcttggctatttatttgtctcttccacattggcttccttgcattctgaggaaggaatgcactctgtttcctcctgtcctgggctgaggcatggattccctttagctgtccgtgactttcacagaaatctgccttttcctacacttctgtttacagcatagccttcagcatggccaaaatgcgcaaaggcactgctcagtccttctctgagtagaaactgcatctcagcagcatcacttcaagatctttattgtggcttctgtgtgtctcctgcagcagacctcttcaggctgggagtcatctgttcagccgagatggctgagatggtgtcctggcatcctagggtgcaggccagacctccttccctgagtccttttccctcacccagggagaagctgtggagatgagtacagtttttcctgtgtcacaatacagttttttttttaaatcatgagaacagcaaccacaattatatccagacccattttttatgctattgctaaaacttaaaaaaattctatactcattcaaatgctgtgatgactttttctatcctagttcaaatgtcttgatgactttagagtaaaggcttttgtaaaatctacgcagtaggtccaaatagtaaattgataatgttgcagtgtaaacacatttcctgggccagagaggtggctcatcaggtaaaggcacaggccatgaaacttgatatcctatgtttgagtcccaggatccacaagatggaagcagagaatggataccattaaatgtcctctgaccgccacatgcacactttgtcatgcaagtgcatatgcacacaggcctgtggacttacacacacagacacacacatacacatatacacacagagacacacacagacacacaaacacacagacacacagacacacacatacacatatacatacacagacacacacacagacagacagacaggcacacacacacatatacacacagagacacagacagacacatacacagacacatagacacagacacacacacagagacatacagacacacagacacagacagacacagacacagacagacacagacacagacacagacacaggcagacacacacacagacacagacagacacacacacacagacacacacagagacaggcagacacacacagagacaaagacagacagacagacagacacacagacacagacacacacacagagacacacacagacacacactcacactaaataaatgtaaaagggtcagtgtttttcctctgagtctgtttctacaaggaagggagatgaacaactgaccagttgttcttatttttcttggggtgagggaaggaagctccaatcttgcagtttcttttctcaaaaacttaaaaaaagatactttggttgtttctgttacacaaaaaattttattgtaatgtataagcctggatcccaaagtacaaacactgcagtataatgtacaaccgtggttttgttggtactgggtaggactgaaggacagcttcgctctctgtttaatgctgaacacttagatttcagactcaaattaaccttcgcacatgcaaattggctcatcctgaatccagctactccaggaatattagtctgtgcttcctctgctgtagtttgtgtctgttgttttattctaccagtgtgtgtgtgtgcatgtgccacagcacccgtgcataggtcagaagacaaagctcaggatttagttctttcccaccctggggattgaactcaggctttcacagcaagcactttaactcacagagccttctatgtttttgttttaaatcaggattcactatgtagtcctggctggccctgaactcaatgacatcttcctgcctaagccgagtggtggtcattaactttttagactcatttaatatttgaagcatggaattttataaatgaaattatcctaatgggtgtttaacccagaaaaactaaagggaaatccacaaagataagagttttccttttttctataaccattgggtgacgcaggccactgatttttgtagtaagtgaggcaggaataaagggagggaagaaaggaaaagagggggggccgagagcatctttctctctctctgtgtgtgtgtgtgtgtgtgtgtgcgtgcgtgtgtgtttgcattgtataatgtgtgtatgcacacacatgaccgcacagggatagaggaaaacattggggtatcctgttctatgtgtgtgtatgcaagcacggggcagaggaagacatcaggtatcttgctctgtgtgtatatgtgtgagagcatgcttgtgtgtacacatatacacacacatgcaaacaggggcaggggaggcattatctgttctgctctctctctctctctctctctctctctctctctgtgtgtgtgtgtgtgtgtgtgtgctagagcacgctgtgtacacagacatgtgcacatacaaaggcagagaaggatatcaggtgtcctgcttgctgtgtatgtgtgtgtctgtgtgagagcacgctgtgtgcacagacatgcagggaaggacatcaggtgtctccatcactctccattttattcctttaagacagagcatttcactgacacccagacctaggctggtagccagcaagccccagtagacaatatctctggccttcatcatgctggacatgatggcgtgcatacaatcacaactgtgtcatttctctgaacattcctgaggaagcttacagttctgggtagtagctggaagccctaaaatgcccttcatccactgagttatataaagaggatgaccaagacactgaatggctctggtgagttcagtgaccggcagggtgatctggagagctgtaagtcttggaccctcatgtgttcatcctgcttctaccagttgttcagttgctgggtgacaggtagacttaagcccggctgccaccagggtccacctcctgctgtattgccataggggactgcctccaaaaggaacaatttaactaattaattaataaataattcttattttttgaggctctcactgtgtaactcagggctatggctgctgctctccaatgggggccatgacaggaagctggcatggacttttaaaacctcaaaacccaccctcagtgacactcctcctccaataaggccacacctcctaatatttcctaaacagttccactaagcagggaccaagcatttggacagatgagccaatgggggctcatcaaaccaccacagtgggtggtggaaggtcaatgttcactaaaagtcaacccgagacagtggttcttgagttccttgtttcatacagatgaagattataaagcggacatgggtggggttagcaaatggaggtgagctaaggaaaagtgagagaaatccccgagagtgggaggggttcccagagaggaaaacagaaattatctaattgtttcatgtaggagtttttaataggacttatggtaagacaatgaccaatgtaatttctgttgcaattggttagttttctgggctatcatgggcagagccaatggttctctctccccacacatgtccccccaacccaaccagggagatgacaactctgtttgttcactgcctgcccagttaaggatggcgaagtcctccctttgtccatctctgacttatcctttattagccactgagcttgactgatcaccctcagcctgctggccatgggccttgcaggtgtcctggtggctgttaattaaactgtgctgttttcgttctcatatatacatgagcagcttgattcacaactgcgaagatggagctatagtctttttttcttcttgctcatgggtggggctgtagtcttgtgtgtggggttgtctgtgtggcctggggtggtctgggtggtatcctttctagactaggtagacatttctcgttagaaacaattcttctccacaatttcctttgttatatgaaagggcaattgtgccttgcatatgttctccaaggaatagggtgaggttggggctttaggggagccagatggcttgctgacactggctcagagccctgtccttcctctcatctggtctgcttggctgtctcttagttgctagccctcttccttatcttccccagtgttcctgacttcactgttttaagcctaactttcctattactcttgtgtctgttctctgttttcactgtaatattcattatcaaaataagctttttcactacaggttcttttctcttactacttacagcaagctagctcttgcctctaagtaacccacagagaagggacagtattgctgcttctatttatatttatttattttattttattttattttttttttggtttttcaagacagggtttccctgtggctttggaagctgtcctgaaactagctcttgtaggccaggctggtctcgaactcacagagatctgcctgcctctgcctcccgagtgggattaaaggcatgcgccaccactgcccggccttatatttattcttagaatcccatctttttttttggtctgtgtgctctataacacatacaaatattgttttccagttgagtggttaacacaatgaagtctatgccttagtccctgctctctctgggtgtccttgtggggggtgactttggcatagtcacagatgtccaggctcctccacccaggtcctcagtcttctttcttcctatggctctaaaaggggaatatgctacaacaattacttaaccaggtgtcccagaagtgacatatttaacttctctcaccttccattggtaataagaaggctggggatatatgggtgctaatggaaccccagcagcattctgatggaggacacacatgtacatactgtcatggagcttacactgtgatcagacaggtgtggagactcctgttttagaaataggaccaggtttggaactgcaggaccacaatttgatacctcctcccccactccaaaacatgatcaaaactttgtagtctacctactgaagcaaggtcccagtggtacttggatcagagggtctcctagcttccagctctttgatccaggtgtgagttttcaggggccatatatccacatgtcaggggacctaggctccctggcaatggggcattggagaaatggggcaatggggcaatggggcaatggggacttttagcactgcccagggttagtctccaccagaatatccctgaggatgatgtgagtgtatcatgccagaaacataggcatgtttgggtgtttgcacaatgtcagaaggcattgagcaatgaattctcaagctacatcattttgttggctgctatttgccaaacagtccttatattacctttctagctggccattggcaaccacaaagttcttttacttcaatgttaattactaatattaacttggaaattatatattataacacacacacacacaaacacacacacacacacacacacacacacacacacacacacaagaatgattacaaaaagattagaagaccacaaagttcatggaggctttgccagaggcagagagctgagacagatgcaaagagggttgctgtatgagatcagatgtggcatcaaagaacgcacttggacagctgctgaaggcaagcagagtcctaccacacagggttacatggctgagccccagaggtgtagggcagtgtaggtgacctacaggattgactacaacaattgagtgggtatggactgcctgatacaatgggggtcatgttcagctgtactccaggggacagccagagctatctgcttgtgggcccctagatgcccagagtgggtagttggatgactaatgggtgggttatagtcagagaagttctaggtgtacttcttttatggggtataggtgagggaatttcagctttcattggtctagtgtgattggtaggtcctgggcctgatggtttgactcttcccaggcacacatacgcccctgctttactttgataaacataaaagtgctacctttgaactcgtaggttaaatttgctcttagtctgtgcccatggatggagctggacagctggtggagtctgtgggtggacccagagctattttctgctatatatgcacttgacatggagtcaaaatccctgcttgctagttggaattaccctgggcaaggcacagcctgcggccactgctccacctcatcgaggaacacagggcacataggaacatcacagtgcccagtggtttcagctttttttagaccttttctattttttcccttaaacctcacatatcctaaaacattttagcaccagaaaaacaaggacaatgtatgggggtcggtactggtttcaaaacttaagtccccattctgaaaagtatctcaagtgcaggccaagcaggacacttgctccccctactggccctctagtgaagaccttttcagtttctctccctggtgtggaatttggcacccttggtgacatctgcttaaaacaatgaacatcctcctcccccatatttccataggggcatcagtgtgcaaagaactcagggttgttacacaatgaaggctgtgatcagaaaatgactcaacacagcccattttttcctatgtgggcatgcaggggaggggacagtccacagataactatcaccaactgtattcatgaaggacaattgacacaggaattttcctcaggattcctctaagaagagaccagggtgtagctgttcaggtagttagaaggaggctaaaatcatttatgtattggattgtcctacatgtgaaaataattagctgctgtttgcacagtcaagcagttttctgtatttggtccccttaagttgactgtatctgttcacagtttacagtggtggttatcatgggggcacaccaagctttaccatcatgctttcaggggcttgatgtaggagctttcaggggctcagaggtactgctggtgggggaagggtggtcacagggtgataatgagcagatagactgtgactccaggtgtttcaaggtgaagcaatatttccaggcagacagaagcaaatagtgtagattccaaccagcagtcagaattattcccagggtctgaaagatgataatggaaaacggacgaagatgcaaatgatggccaatccttgtaaatggcctggatttgaaatcacttaggagacactcctctcagcttgtctttgaagatgtttggagaggtctaactgagagggaatacccaccctggatgtgtgtggcaccatgggttgtggccccagactaaattaaaggtaatgaaggaagaatccagctaaacaagcagcattcatccctctctgcttgttggttggggaggcaatgtgaccagttgttccatacctgtcaccaggccttcccttctgtggtggactgtaccctcaaactgtgagacaaaacacatccttccttcaattacttttgtcaggtactttgtcatggctatgaggaaagtaaatgatacactgcatctcagaggaagcaaggctcaaggcatgtctgccaataaggacatagggttgggtgagtccaggagtgactcctgcttgtaaggggacaagggagccattttgtgggggattaagatgcagaatgtagagtaacttgccctagtacgctaggcttttcttttccgtaagcacacatgaagctgcatctattcttgcctgatctcaatggtctctatcccaccccacccccaattcctgctcaccttgcatcttattgccagcatttccattttctggaaattagggtgctaccatcgacccagtcccagcttcaatcagctaaatggtgggcctcagtgcatatggtattctccttgggttctgtagcattgtccatacctgggtgtcctgctagttttatgtcagtttgacacaagctagagttatctgaagggtgggaacctcaactgagaatatgccttcctaagatcaggttgtaggcaagcctctaaggcattttcttaattagtgattgatagggggaggacccagcctattgtgagtgctgccatccctgaagtcctgtgttctatgggaatgtaggctgagcaagccatgggagcaagcaagtaagcagcacctctctatggcctcttcatcagctcctacctccaggatcctgcctgtttgaatttctgtactgacttccttcagtgatgaacagtaatgctgaagtgtaagccaaataaacctgttcctccccaatttgtcttttagtcttggtgttttgttgcagcaatagaaaccctatctgagacactgggccacgtccttgggctgctctgggtgctgcaatgggaggaggtgagattcagtgccctctctccaactatgtcttgtcacctgaggcctgatacttcttatatctggagtctcactaagcccttcacaaaggcgacccatccacacctaggctgttctccagcttgagcagcagggaaagacccgcaacagcccctccatgctcgtttctcttttcttccaagagactttcttcctctttcaggcagtagcacaaaaacacattttcgtgtcagcttctgtggagagacccaaagagaccacaggctccccgactgtcctccctatagtggaaccggggtgtggccagaagactctgtgcagtatctctgcccctcaaatgcagcaccaaggtcattagttcactgcacagaaagtcctgcaaatagacttttatgaattgtggtgatatattgtttatgatttattaaagtcactggcgatcaaaatagcaatagaagctaggcacatgtctttaatccctggactcaggattaagacatagatagatctctgttagttcaagtccacactgaccacataaaattgatccagtcctaaaagaaacatctcacataaaggtgatctcagcaccatggaggtggagacaggagtggtgtggttgggtggagaaaggaataaaaggaggaggagacaggatctgaaagccttttgcccctgaagatttgtggagacaggattacattttcatctgggtagaggtaagatttaccggcttggctgctttgcttctctgatcttcaacttgaagcttgaaccctagtatctgtctctgggtcttttatttatcatgcaacagtggatgatgcttctgaggtgtttaaaatgtcacagctgattttgaataagaagatgtggagtaattcagggtgtatcatgaaacctaataaaggatggagcaattatgtcctgtttccagaaagggccaggaaattgcactggctggaaagggttagaaccctcctgtgctgttctctcttgttccctggaaaagattctctggatctagccaaggaaaggaaaatgctgagaaataggtctttatttttagctgtcattgtttttcctatagaaacttagaaagcatcttttcacttaacctatcgtagctaattacaaacttaccaaaccatcagaagcaaaaccatgccaaggacgcagagaaagacacatcttagtcccttctctgagtactagtgggctgtgcctctggctcgtgttaagctccagagcagtgcttccttgggccactcacagccttttaggccttaaagaaatgattagatgatagagaagaaagcgtttctactttagtaccactcatttcccattttcaggcccctagagagcaaaagggggtccttgctgtttccacttgtacttcaggattctgcatcagccatggtctgtatgtgtgggtgggatttgtcaactgttcacttttctcatttctaataagggggtagggattgaatttagagccctgcgaatgccaggaaaacaccccaaacactaagaaacatcccagctctttaaaaaaattataattatttttatttatgtgtgtggctatgtatgtatgtatgtatgtatgtatgtatgtatgtatgtatgtctatgcacatgtgtatgggtgcctacagaggccagaagagggcactgagtgtcctggatctggagttacaggtaggtggttatgaaccacttggcatggctgttgggaactgaacccaggtcttctacgagtactaaaccatcttctccagcccttccaccccatttttgtggttttcattttgagacaaggtctccctaagttgcttgggttggccttgaattcactctgtagcccaggctgaacttgaatgtgcaaatctgcctcaagcttcccaaatagctaagatgacaagcctgtgttaccagactcagaaatcacacattattcttggatggtttcaagtgatgctaaaatgactattgagaactctgtcttctttggttttgctatttgttaataacactgaccactaacctgatgactattccatctcatctttctccttctctggtaggtacagatgaattaattgtagctcctggagaactattcccttgtgcttaaaaaatagtaccaaattttccacctgagtttcccatggagtagaggcaatttgatgctactgtctactaattttaatttttgctttgcctatgattgttttgcccacatggatatctgtgcaacacttgtgtgcctgggccccaaagaggccagaaggtccagactttgtgagctgccatgtgggtgtgggaaatgaactcgggtcctctgcaagagctatcagtgatcttaaatgcacacaggtcaattggctctcgggtcaactggttctcaggtcagctggctctctcagtcccactatacagaatgagaattaaatgtactcatttctttacctcagaatgttttaggggagttatttaaaggtcacctgaatgacccaagtgactcaagtggaaaactacaggtgtcagggacattttaaggagaattctgtttagtagttgagtagcctcttgagttacttggataagccacagaccgatatgtaggctctggagggctgtcttccagaaaaaaaggccacaacttgctccactagtgacaacttgtgtgcatgagaatgttttcggctgggctctgcagttgagcaatgttggagtctcaccttgaagactccttttaaatggaaggctctttagatttcctatgtaagttcttgcattatttttttgtttgaatagattgaatgctcacctgtggatggaaaatcaatacattagtgtatgtttgttcatgaattcaacttcatcttaatttttctccctgcagtcaaaactctttggaatcttattccgtattcatcataacactgtggatggctggatggtatttcaatcaaggtaattataagaacatgtcaactcatcccaaagatgaccgtggtgtttaaaaacaattaaagggtgaatagatgaccatacagctactgatgctgataatgactttaaatataagaaccaatacctgtgtacatccaagttataggtgatttagttcaataattaaaaaaaaataaatccaaacactagcatctggatatagaggtaagtactggagattccagtgctcctgatctcgaggcagagctgtctagtgagactctgtctcaaaaagcagggattaaaactaacctgggctcataggggctcagggattcatagaaatgacaaccaggagcctgcatgggactgacctaggccttgtataacttggtcttcatgtgagagatgcttaacagtgagagcaggggctgtctctgactctgctgcctgctctttggacccattcttcctactgtgttgcctcctctagccttaatagaagaggagatgcctagttccattgtaacttgatgtgccagggccagctgatgtccatgagagaccctcctgtaactgaagagaaacagtggaggaggagtcgatggagcggggaagaggagagagatataaaaacaacaacaaagcaagagttaataatgcagctcagcggaagaatacttttctggcatgtacaaggccaagagtttgggtcagaacatcctcctactccccatcactcaaggtcatgtggctataggctatacataacttgaaacaaactatatgctagataatcaaggataaaaatgatatgaaccttgtcttcaaatctaataatctaatttaaccaaaggagcagaacacaaaaagcaattcacttttacaacaacgtttatgggacacttattgcatgcccggttatttcttgaacctcatagacttgtaggatttaaactttcatatgaaacagagtcaataattgattcctactttacatatgagaaaactgagatgcacaaatgttaagttgtccaacctgatgatattcaccaatgtggagaaaatcttccactcaagggcatagcaggtctattgctatttgcccaaagtgttctgaaggacatggtgctgctctttgaatgcagcaggtctgcaagcatgtactttctgtttggctgaagtttccttgctgagctgagggcttagtgtacccatgtatttgtggggtggacctatatggacactctagctggtgaaatagaatcccctttgattcctggtaacagtaatggcctcatttgggtatgcatttgattgctaagatttaaataaactaaaatccagctgcttccaaagaaccttcatcaatctctttcttgcaatttttactgtcaaccgaggaatttcagaaacaatgacctttagagaatgacttttaaactttactcaactcatacttttgttccttaatggcatgagtgaaagtagctgttccttttcatctaagggcatattaacaactaataagagaagtgcctttggataatgggattgcatctctgtcacttgacccctcggattttcccatgatgggctgaatgaggtggactgccgagcaggaaaggggggcatggatatcatcattcttttctctcccaaagtaagctggttcctgagctacatctggttcttgggtatcatcattcttttctctcccaaagtaagctggttcctgagctacatctggctgttcattggctttgggagaataattcagcaggtcggggtagtaattctcaacagagagcatgcccagaatgttaacatcctcagaagccaggcagctctgtcactactctgggtccctttgttctcatcctctggtgcctcctccttcaacagtgtcctccagacgcctttctaagaagacagcactcctccagttccttctgtcccacattgtcccacactttcaagcctgcaatcttcctgtctttgtctcttgtctttattaacggaataaaactccattggggctggtgagatggctcagtccttagaaagccagctataaaggcttgagttctgaccccagcatccacacagaaagcctggcccagaggcacatgcatctgtaacgcagtggcaagaagggaagaaggggacaggctctagcaagtgagctccaagctcgacgagagaccctggatcacaataaacaaaaactaaaactaaaaaagatggggagagtggggtgagggtagtgacagaggatgatagtggacatcagtctctagcttccatatgtacatgcatgcaagcctgtccacatgcacacatttacacgaacatgcacatcatgcaacacatacacacacacacacacacacacacacacacacacacatctataagataaaggatctgctatgggtagacaagaaggtttttttttttccctcttcattttatcttcttagggtgctgaggatttaacccaaggaactgagtgtgctggctaagctctgtctctctctattgagctccagccccagctctagaatagtaacttcatagaagcaggcaactgctgaccaaatccttagaaaactcctggcatatacaggaaattaaaaaaaaaagtcttggtgaccaagtaaaatagtgactttaacagtatgtcacagtctcagacagaggctctagaccttcagtttgcatctgtgtggcgctgaggaaggggcctcatttagagaagatatcaatattttgactggtcaggatgccagcaacatcaatattgtgctttgcatattctggggataaaacttaagcgtgataaaatgtacagatctcaggtgttcaacggagtttaacacgagtgactcaattccctatcaaggtgtgtaatgcggccaccactcaagaagcctactcttgcccctgcacccatccattcttgctccttccatggctctgatttttgcacagtttggtttttcccattctagaacttcatgtgaatggaataatacagtacaccccgaggtgtaacgcaacagtccacagcaaagtgctactgagatccaccatgttgctgcaaatacatttctctcattcactgtggagtgtcagtacactgagttactatactgtttggttatcaagtcctcccaatgacaaacttccagactattccatctcttggttgttatgaacacataattcataattatgatgaccaatcacagttttcatgaatgttcctgaatgggtctttttatgcatatgtgtctctctgtttcttgagtaaatacataggaatagaattgttggattaagtgatattttactttcacatgaaaattccagaactttccccaaagtggctgtgtgattttacatcctactaaggatgggtgtggattctagttgttctatatccctactcaccattttatattgttgatcttaaaattctagccatgtctatcatggtggcacacgcctttgatcccagcattcaaggaggcagagacaggtggatctttaagttcaaggccagccttgtctacaaagtgagttccaggacaggcaaggctgttacatagagaaaccatgcttgaaaaaacccaaacaggggctggagagatggctcagaagttaagagcaccaactgctcttccagaggtcctgagttcaattcccagcaaccacatggcggctcacaaccatcccttatgagatctagtgccctcttctggtgtgcagatatacatggaagcagaatgttgtatacataataaataaataaaatctttaaaaaattatttaaaaaagaaaagaaaaaacccaaacaaccaagcaaccaacaaaccaaataaacaaacaaccaaacaaaaacaataaaatatttttaaaaaattctagccattctgctgggtacatgaaggtaacatctcactgtagcctaaaaacatttaaaatgaattatttttgcttattattattattagtgtgtgtgtgtgtgtgtgtgtgtgtgtgtgtgtatgctcagtgcatgttgaagcatgtgccacatttccacatggaactcaaaggccaatggtgtggaatctgctctcatcttcctcctcctggagcttgacctcaatagccagacttgagctgcaagcttgcctctacccactgagccatttcactggctctcactgcagtttttaattagcagtttgctgaccttgaattgtgtcgaaacattttccatgtgattactggcacacttatttatcttcttgtgtaaattgtgtattcaaatatttcacttgcttagcaaagttgtttttcttttattatcataaggattatttattctgggcacaaaattttttgtcaggaaaatatttttaaaatactttctcagtcaccacactttattctgtgaaacattctttaagttctgtgcattttctttattttatcccttgtgtagtttttgcaacttgtctgggtctcgtgtacatatacgcccgtcacaagtacttctggggctatgcagaaactactgacggaaggtaaggagaacccgataatggtatgtttgtgcaaggtacagcagggtgtgttttccgttcctgagaggattaagaaccaatggagtattggtgaccaaagtgacccgcgttgcctgaggccagtcttgccaaaccacacaattaggcatgagatgagaaaatggaggtgggaatctgctcaatgcacaagctgcaaaccccagcaagaattctgcatcgtttctagaatgtttaggtgaggggctggttgacctcagtggcgtggcatcccctctaattttcacgatgagctaagtattttaaatggcctctttctgaggttctgagcagttccaacaaggagcaagcagcctttgccaggaccccaaagtcctgttcgcagcccaactagccacctcaccccttcatgcttaccctgcaggatcactggtttcaagctgagcctgggggttttggccttgttgattgtcctagctgtcctgggattagcaagcagattcctggatgaatacctggacctccatgttgccaagaaactgaggcatcccttctaaggttgtctcttccctcccatgctggccgaggctttgccactctaaagacaatgtggtgtcctgtgttaaataaaacttttaaaacttttcatttgtttgtctccctgtggctttgtgaaaacaccccatttgccaaccctgcttaagaagtgtgcttcctggtgtgggcccacctgcaacattgttgcatcagtgctgggctctggctttggcatgtctgttgaacgtgtgactgtttctgtgagaatgaagcttgacccacatgctggcattcatgtgaatcatcactacagtctctgacacagcttctgtccccatgaggagttccagagagaagcagctcaggcagatgggccctcagcactggctacggcacagcaacaaatgccaggagtaagagatgtcaaacacatgagatagccagagaggagagccattgacgaaccacacaagaggtgtacttcataaagaacaaaggaaaaagaaaagaaaaaaaaccaaccttattttaaggatccacccagggacatggatattcacgccccttggcaaagggaggtggatcctgctgacagtggtaaaatctaatccggcttccactgcgtatctgtgtcttgtgggacttgtggcataattgaggacacagtggaagctgagtggctgttctatcttgatgtgcagtcactacctggcaccactcatttgatatttcagtttttcatctgagaaccaggagcgattccagcctacagcctcagagaccttaggaaaagaggacctgggctccaccaccaggcagagtcctctgtcagctggtggccccatctccagacacccgttactatactagaatatgaataacaggcaaggaaataagaagcaacagagcttccagaatagcaggagctggcaacccctggacagcagtggtaaggcactggtttggaaaggggatatttgcactgaagtcccatttccccattgctaggtgaccgactgtggacaaggtaccctcaatgggaagttgcaaggcaaacactgagttctcttcctgtcacctgatgggcacagcattggaccccagcactctgtagctctgaccttcattttttttccttaggcaaaatagggttaatccttaaaaattccaagctaagtgcaacttttttttttttagcactacatcatatttatcgaattcacatgtcatttggaagaagaaaaaaaagctttccaagtttttactatctcaaagtaagttctattttgtatttagtttgagcatgctcatgcatacacatgtacactcatgcacacgcacacagatggttaaacacatgtggaaacaggcaaagggcgtgccaggttttcaacacttcccatcttcagatattaccatgggatttgtttttgttctaatccattgccaccaggaaatgtctttattattttaattactattaaattgggctataagactctgggtagagccagcctcctccatagtagattgcatttgcttctggccaaaaagctgtttttgtgttgttgagacagaggctcagtctgtccttgatttcatgatgcatctgtcctaaccttccagtgccgggcaggtagtgtctgttcagtagtctgacagttgttcacacatgctttgattagtaaatctgaccaatttacactcagaaaccagcttcatcctgacaacagtgtcatgagaagaggggcagaggaggcaggcctttcgtctgctggagaagtcttagaaggagagaagagcaaagggcagagagatccttgaggaatcccatacagagaaaaaaaggacagctgtgggaaacctttgcgagatgactgtcactacctggatgtaacatggaataagaatagaaatgatgagggaacaccgataactgttgtaggtgttttaatgacaccgtggttaaggcggagaacgtcccctgccattgcatgctcaggtgctgaggggggagtggttgaaggcacgtgatttgctctgaaatgcttcccaaattctgcataagaagtaattattgcaaagtattaaccacggttaaattgagctgatgactgtgagacagtctttctgtttccccaacagtttggagatgttcaaagttttaaactcttaaagaaaagttgaaataaacaaacaaatcaggttttccatagctgggaagtttcttttgttctgtgttagagatgtgatgggggacacagtggcaatgcaggatccactagtgttggtctgtccctgatggcccatgtatgggcagggtggagggggggtgagtacatggaagcagcggtaattcctcctcctgcttgttatttgaagtgagatggacacctgtgtcagctgggctatagaatattagagtaagaatctcatgtcctttgaacagagagagagagagagagagagagagagagagagagagagagagagagaatgaaaagaagacaataaaaagaaactgtgaagataagatatgggtcacatattatagtcttgtttcttcctgctttgtttccatggttgggcctcaaaaaatatgttcaaaatatcactaataagaaaaatatcacactgtttgtcccctcaccccagctccccctttctcagacacagtcctcgaaacaactcccctgagtctgggaacattccttaatccacagagaagttgaatatgtctcacatgcccagtgactttccaaaagcctagacatgttgcctcttcatctcctcactacagactgccacgggacttcttaacacccagatcacacacgggaagcatgttttttgagatagggttttactggtcaaccaggtagccttacactcagtgatccacttgtttctgctgggattaaaggtaggtgtgtgtgtgtgtgtgtgtgtgtgtgtgtgtgtgtgtgatatccaacaagagagcaaaaagatggactaacaagacaccatgacttggatatgaaccatacatcggaaggagaaaggtagactctaagtctcgtggtgcagtgacagttgccttgcctgtggtataggtgacagatgggagggcgtttattgtgctcagggtggttgctgctacagcaaggggtggatgataaccatggcttgtgactgtccttggaacaaatgatttcaaaaccctggtctcaggagactaactttcacattgggccttgacacacaaaaatcttatgccctagccacactccaatactgtcttgtggcagaagatccatcatccagttctgggcattgtctagactggcatctacaatcatcttgtagaatcctctgaggcacctggcaggtaggtgcctgtgaaaatgtctgagcatgaacttcataccacacattcagttttatcttaataaaattatagatttatttatttttttaagaagaaaggtattccactcatccagcgcccaacagattttagtataaatttgaaagtgaggagccatcgttcttctcgagcttcatgtttttaccctgttgtcaactctctctctcattctccttccaaccaaaacaattcccctttaccatcccgttatctgctaaagtctgcgctcatacaacaggggccagcccagtggaggctactttctccatagcactgtcagccaatctggaagcacagcccactgtgggtagggctagcctcttcttccacagtgaaattcattctttctcttggcttatgtatttaaaactcgcctgttttggaactgtttctactgatgatgtttctttgtggtctattttctgataaactcaagagttttgaaacattttactgtgttttaagattaatggggttatcttaagggcaggtcttctcaaagaggagaaatggattctcatgtatgtgatatattaatgaggggattgaagaaggtggaggaaaaaaaaaaggagtggagcaacaggcggaggacaggaagaaatcaagcaagggggcaagtggaagccaggccccagtctctgcctgatcctgcagcaagctggggcaccattcatcctcagagtttgtccagacaagttactggccttttattatcctgcagcagcgagttattggctagagttagaggagtataaacttgaagcattttcagctcagggcagttacaggaaaagctgggagagaccctgttttgacagatgtatcgtgggctagcagaaacaaggggcacagggaagagaaggtgtcaaaactgcccattacagtgggcaagactactgaattgtgtctccccaatacattccaaattttttccatccaagttttactatccattttctcttcattatatttttatacattaatttgtatgtgtgtatgtgcacatgaaccatggagctcatatacaggtcaaaggacaacttgtgggagttgctcctctcctacgactctgtgggttccagggattgaacccaagtcatcaggcttggtggcaagtgcctttatctgatgagccatcttgctggccccattattttctgaatgctctgactgagctagttttgaattgttctggtcctggatctatgaatagacttcttcgtgttagatctcccgtccctttcactcccgtccctttactaggatgctctagtaaactcagaaagtctctgctgtgtggttgaattaagaaggcttgagagtgattgatttctactgttaaataattccgagaaaggaatctgcagttagtccatgagaacccgggaatgatacatctgcttaactaatgctggagcagaaagggcaccctaaagtgaactatgccatggattgattcagagagtgacatgttatttccattgtttgttttttctttaaaagtggtgtgtcaacattgcttcgctcttacatttcagagttctgtacattacttaatggaaatgagcaatgcttgctgcacaaagtaaaaacagaaagctagaaacctctgaattaaatggaggaagttgccacaggtcatacagtataaaccagtacttagatgtcatctgaagtgtatgtcacctcttcaacgatgagttggggaggaaataaaaatactctattttaaacaaacattatatatatataatatatttatatgtatactttttacatatagtagacccagtgatatctgtagcattgtaaaaacttatgtacaaataacttttttttagacattacatatacatcagcaccgtagtaaaaacaaaacaaaatgacctcattaaaatctaccatctattagttggtccttagactgagcactttcaggaggcttttaaaggacaatggagcccactctctccacctccagttcctcctcattgcttatatacttttttttttcctgtaacctggcaggaaaaggtgataaatttgtattctgttttctcactttactattttttttattttttggttttcacgtgtttccactcagttttcctagtggcagtaactccccattctgggagttcatagtcaccctgccaccacctctttggagaggcgcacagctcctcaccctggtgcctccagctttacttcctgtcagagcaggtctggaactctggaaagatggagaacagctagctccagagtgccctgcttcgggactttcccttctgtggactttcttgggtatggccggtgcagttcccacaggcttgggtttctggagtaagaagtatgtgaagacatagaatgaaccagtttgtagggtgtgttcgtgtgtgttcgtgtgtgcttgtgcatttgggtggttaggaggacaataaacaccatggataaaagtcacctgacctccaagatgggattgtgggaggtgaggtaaagagcaagagacaaggcttgtggccatggagactgttaattccttcttcgtttacacttcaggcaactttgtgtgagttaccaagagaactgcggtgtagcttttgaagtagactgctttcaggacaaggaacatatctccctctctttaacatccaaattggtaagatcgagtcatgaattttcagcatttccatctccagcatttgatatttgcctttctgatgatgggattgataaataagcaagactgattctggagtgtcattgttggccccatctgaagagctgggatcttcagaccattcttccctggggatagcagaagtatgggtgtaactcttataaagcctgcagcttttatcagtgtagcccacttggctccagtggagacctttgtatgccagacagtgtctaaattcctcttgcactgactttgactttgccccagtgcttcacctcctgggtagtgtgtagggagaagcaaaggcaaggctggcatacaggccaggaggactagaggcagtggtgagggaggaaggggctgggctggcagacactgaattcagcaggggtctttccatgctatggccataaacagacgaaaaccagctatatgtgtcaaatggatgaggactctgggaagctcagtgcaacctagagtaatggccaccatggccactggcagaagctgaccttcagggctattggatgggcccttctcaagcattgttagctatcctggtaagggggctggcagcaacaccttaccattcctgaggaccatcgctgggcaggagacaggtgaacctgcaggatccttgcttgtctccctagggccagctcaggcaagctcactgttcttcgtgcctacctccaaatccaggaacatgtctggaagtatacatctccttccatccagcatccagagcatttgtgacctatgcacatggcctgtgtgtctcccagcatcctctgctgggctttctctggctgaggttccatctctgaggtctcgggacctgaggcaggacggtctaaggggacctcatcttgggccatagtccctctgggctggaacaactccttctgggccagtagatcccaggggtgcttagcagaggaactcttgctgcctcgacttacccacctgctctccatatcgcttctctccaagcaggtgtctgtgtggcctctgtacttgattgctctgtggaaggcaggtggaatgaagccccacggagctgggggttgacacctgtaccttctactgtcagccagctgtcgttttctcagtttacgtgggtcaaaaaaacaaaaaacaaggatggggagccatcctgtttctttctttcctgtgaggctgccaccactacagatcttggccccctcctgactaggggttaccaaatagttcatcaagctcttgcatccactcatcccccgggccacttttgatgatggagtccacgaggtctgtactgtctgggaggccagggaatgaagccccagtactctcaccgctataattgtatgacatgtcctgagcagggttccgctcataggcctggccctggttgcttgcagcaaagctgccacctgctatttgctgctgtgctgggggctggctgaatgctgccatgccagggacaccctggctcagaccagacatgaccaaaggcctgacctggctggtaccttgctgccctgcgagtggtggcatcatctgacggcccatagctgctggattgagggttctcactgtgccagtgttagcatccatgactgactggctcagtccctgtgggaagtgttgttttgtcagtcttggctgaccagcttgaagtggatagctggcaccattgttgaatggtcccagctctccactagtcctccctggaactccttgcaagcctctctgttgccagctttgtgctccttgctggacggttcccatgacgctctgaagccttggtgggccttggggcctcggcaaggcctggcccacgggtcctttcaactgctggtgctgctgggaaagagccgagttcaccagcatgctctgtccaaagccactcaccatgcccaccccttggccagaggcaggctgcctgggtccctgggcttggttgtgtgggatgctcatgccactttggttcgggtgctgcagcatttgggtcattcctgtgctcatgttgtacattccaggttggctggttggaggggcactgtaaggcgacagtcctatctctgactgggcggctgctgtggccattgtccccgggttctgagagggtcccattcccatcatgcctgcattctgtgccatcaaccttgacgttcgcatgctctggagggctgcctggtttctcacagctgctatgtcctggggtgaacctacaggggagaaaaggacagccatcacccattattctctgtatcagtatgttgtaagatgttgctggaatcttctcttgggaatgacagtcctgtatatgaaagatctactgcagaacatcgccacaaaaggtcattacttagatgattataacaggtgagttgtgaaaactttgcaaagtatttgaagatacaaagtcagaaattaaagtcacctgaatcccagcatccagagaagatccctgccaactcttatttatatttaaatagacacagaaaattgaggtcataccccagcgttctgtttgttcacgttcagatgcaagtcatttcctattctgggtatcatgccatcaagtccgtggggcaccatctttttgagtgttaggaaaatgtaccatgggctaagttgagtgtggtgatacatgcctgcaagcctatcaacttggaagacagggaggaatgaggattgggggctcaagcttgggctatacagtgaactccagtgggattctgcctaggaaaggaggcgaagaatgaagaaaaggaggagggcaaagaagaataaataatgtctgttcaatgcatattctctgtgagaagtggaattcagttcagtagggaatccattcaatgaagtccccatttgactttttttctttaagacttgaataggatttgaggcacaaggtcattactgctgcctacaagctatgtgaccaatgagatggattttagatccaccttgtagctctccatgagcactagagtctgactcattggcctgtgtctgcagctagaaaaagaagacatcctgtctcttgttacttagcaaagaatctcatgtcttgctgtagcaaagcccacccttttggattggcaactgctttgcatgcgtccctccctccccccaccctcccttccctctcaccctcactcccaaacccctctcctctgtcactaagatgactatctagccaagcaaacaagactgatattgggcctgacagcactagcttgtccttacaggttgctcagctatcaaaatactctgtagccttgacaatgaagaatgatgagtcttgctgctacatttcaccctgggctggctagaacttctctatgaccaccaaggatcagcagacctcacaggggtcctccaggaattctttgtggttactctttttagtttgccaattattaggtttgctggttactaaccagatataaacagagcatggaaagcaacacactggccccagactctcgggaagtcaggaccagcaggtacacgatggcctcaccttggaactgattgacctgctgtactgggtatggagtccgctgttgctggaggtgctggcggggcagatgagactgctgtaactgctagaatgacacaagacaagagaagccagaggtgagatggggacagcacacagttgagtatctgccagttttgatgaaggcagtgtatcatttccccccaaatctagattttgcatggaaaaacaacatgcatataggcaagggctgcgtaaagtaaatgagtgagtggatttttactaagtgggaacaccttgaaaactactcccaccctcaaatccagaaacagatgctgtcagaagccttagtcattcccctctcttgacctagagcatcattagcttaactttgaaccacatggactacgaatcaccgaaagggagcctgacggtttccatctcttataagatggattccttcatgctgagttgtgtgcttcgtcttcactaccgactataattctatcatacagacataccacaatttactcattctaggagagacagtcacttagggtgtttctagtctgcggctgttgcagttattactgttgtgacatatcttctacagacactttcttcatttctaatgtttgacttgctggctcatgcaccaagtgaaacaattttaactttgattttccagtatcagcctgactgctttccttagcactatggggacctggctcaaagggacaagcaatgacttttaatgacctaagtagatgctgtgggtacaggaagataggctcctcgggatatatacatatatatcatatatatacacacatatagactaatcatatatatatgtatatatatacatatatatatgctaatcttaataccattatgtcacacgacctgtacaatacatgtctacaagtaaaatactccaaatttggatgggcagtggtggcacatgccttcaatcccagcccttgggagacagaggcaggaggatctctgtgagtttgaggccagcctggtctacaaagtgaattctatgatggccaagactacatagagaaaccctgtctcaaaaaacaaaacaaaacaacacacacacacacacacacacacacacggagggagggaaggagggagggagggagggagagagagagagagacagagagacagagagagagagagaggagagagagagagagagagagagagagagaaacaaaacaaaaaacccccaaaccctctgaatttgctgccctgaagcagacatgtgggattccagctattccaggagtcggaggcacacctctagtctttcttctttggtcgtggggattttgttccacaagcatcattaccggcatgctgggcaggctgttgggatcattatcatgtaaaggaaagagacacagggcaaggggaaggagctttgagttctcagttggccatcaagcatccacgtgaccttggatgcccataacctctttccagcagccgattaatatttattaagaacttctcttccatgagggccaaagaacatgcaaccagatccccactcttcagagtgcctgctataaaaaaaaaacacccaccggccacttcttaccacatgtgtacttctattttctctctcatgtttgctcctgggcaggcctgcaattttctgtttttctttcttttcctctaaaaggccagccagcattctggcatccaaaggaaaaaaaccagaaacagcctctgccctgttgaccccagcctgtgtgtctaccgtgggactatacacaaaaagagattaatcaatgcatagcgcattatgagcacaggccagaaaccatgcaaacctttcaggcaataatgcgaggacattattgagagcaagctgagctttcaaaagtttatcttggcctggggagagagctgagtcagcaaagtaattaactgcctcagaagctgaggccctgagtttgagtcctaaagcccaggtttaaagaaaaaggtgtaatcccagggctgggaagacagaagcagatggttctctggccaaacagtctagcctgctctggaagttccaggtctggagagattctgtcttagtaaaggaggtggacagtgccagaagaatgccacctgtgggttcctcgcctacacacacacacacacacacacacacacacacacacacacactttctccttgtcaaacttcctatacaatatacaagttccctcatttatagggagcactaagtgtgtagcaggttagggtgtggtttggagtcaggattcactacttcccttttctaagggtgtggtctccgaaccacaggagctcctccccagctccagtcttcccacccgtaaatgaagggtctttataatcattactgtttatctgaaactcaaatgggaagttctgttcaacctgtgtgaatggatgagagggacatgctacatgcttgtgagaggaaggcattagcctcagtctccacctgcttttaaccttcttggctctgatggccaggtcaactgagttcctgaagacaggcaggacctcaaatctttctgttgtccttcacatgggctttcaggaaaaacaaatgtttccaatatgttgtattccagaattgaaagtgctggggcttgttcaatgctgcaagactgagaaaatcagaatcagcgtggtgctgatgtgacaatcaatatttactctcagggctggggttcagcgcagtacagagcacttgcctaacaggtgtgaggtcctgggttccatccccagcattgccaacaacaatagcaaagaaatctcaaggcagaaagccgagaccatcccacagaggagcccaagtctactgcactcataaacaacacacagggcaggtactggcaagcagaatgttacattgacatggacagcacgcggggctgtagcttttctacaacaatccctgatgctctcacgtgttctgtgagccattcccatattcatttgtgtatatggtttcctaaggagtttgcataccattatctcaagtaatctttaagacaggaaaatcaggcaaacctaacctgctacacgaagacagtttttttcttttttaattgtgcagttcgtatcttctcacttacacacacacacacacacacacacacacacacacacacacacacgttcttatgtatgtgtgtggtgtgtgccaacgcacttatgtggagggtacaggacaacctttgatattcgtccccaccttctatcttgtttgagacaggtctcctgcttgcctctgtttatcctgagtgtccccacattctcccatctcactgtaggaatgttgtgattatagacaggcatgactgcacctgggattgaatgcaggcctttgtgcaaacattttacccatctcttcagccttacatgatttattcctctgttcaaaatcacaataacttcaaaaggatggacaagcccccaccctgagccaagtaatttcaacttagtccctcagtttcctgtttcctccatgttttctaggtagtcccatctcgccatagttctgaggggtttgttccgtctccttgtccacaggcatgggtttgacataactcttcctgcaatcttccacttcccttttcatcccttccccagggcttggctgagtgggctgtggtgtggcttgcaagcacacccctgggtgggcaccagacgagttctgtctgcttaccccgactgcttctgtgccttgtttgcagcacatgtatcagaaatcatttctcagggcaccaggcacacctgaaaatgtcctgggtttggtggaggagagatttacaaagcccagagtcccttagcagctccatttatcactgccggagagatattagcacagctccttgtcacacaccttatgcagggtgagagggatagagggttgtttgtacaatagctgccaggtggccgactgaccttggtaaaaagggagataattacatagctgctcaggaacaaaagcaaaaaaataggaacataagcaagctatgctcaacagtacaccttcttctctttggagggtgactggtgttttttgtaactgctgttcttggtgggtagggaccttgatgtgcctgtatcctactcagtgccctgaagagagaattccaaaattctaattctattaggaacaagaatgagcaagagtcaaagcattgctgggcctccgaggacagtctgacacctgtgatacagagcctgtctgcaggtccccacaggggccatcagggatctctcctggacagtcttaggcagttccttgggataacactaaatcaggcaccagcatctctaaaaacaaaacaaatcaaagattacaggggctgtctgcagggaaggctctcttccagagctggaggagttatatggctggggtgggcaaggaggcctaaggtaaagacacatttgtactaggccttcctttaacccagattgcctgagctctaggtaaaggtgtcggggctttctccagctgcaccctctcctccaccctttcccagttccctgatagttctgtgcccactgtaacattgccagtctactatttataactaattcagtacaattctccactctttcgnnnnnnnnnnnnnnnnnnnnnnnnnnnnnnnnnnnnnnnnnnnnnnnnnnnnnnnnnnnnnnnnnnnnnnnnnnnnnnnnnnnnnnnnnnnnnnnncttttttcccccccccccgcggtgtgtgtgtgtgtgtgtgtgtgtgtgtgtgtcgtggggagggggaaagacagggaggagggggagggggagggagatggggagagatcaaccctgaactttattactcagggtccatctaccttgtttaatgagacaggacctggcttgcaaaccccacgaatccacctccccactgctggaatgatggttacacagcttctgcaggtgaactgaggtccttatgcttgcatggcaaaccctttaccaactgaacttcatcttgctagctcacaaattgtttgtatcactactattttgcttaatgctagcaatatcagggcctatggtaaatgtgagctagcccccaccacatgctggtaataaagacccctgtaccagcaaccaggagaagaggagtcaggcatgaatggaagaactgtcttcaggaaacaggccttcaaattgatgactggaagcttgtctttaaagaaccaactaattcactgagggataaaagcctagctaattgaaagggcataaattctacaggttcttctatgttactatgaagagttggtctatgagcatcttgacagggacagctgaaaaacctgttcctcacaaacagcagatgccaaataagtgccagctgaattgatggctcacaccttggaggggggtgttacctacctgctcagccaggatctgctgctgttgctgctgctgctgcctctgctcccgaaggaactgttgcttctgatgctccattagctgggctcgttgatccattagcatctgcttcatgatggctgcctgtggctgcccaccgaggaagccaagacccccaggactggctcctgagaccatgctgcttgaccctgggggcacagagttctgcatggggccggtggtcctgggaagaccgactgcatgctgctcctacagggaccagaagaaagcaatttagaaattctgcttggacacctcctgccatttcataggaaacttctgaggggaatggcgtagaagtcctagtttgggattccaccattccacctccagaaaaccatcttgtaattttccataaaaaccattgtgttggcctcaccatagtagaactggagaggccacagagggggggaacagtaacagtaacagagaatgggtctgggaaatgggaagccaactcatctgtttctgatgggatggcatagtggctgtgcactgggatttcaatactctatttctccaaagaaaggaaatatcccctcaggctgggctcgccataagtctcaagggtccttacctttcctgatatccaattccttactgtctactttgccaaaacagacatcttagtaaacaggagagacatacacagaacacatatgctgctagaatatgatcaccaacaaacctgatgttggacgttagtttagccaaccaagacaccagcttttttttttttttttttttttttttttttttttttttttttgtgtgtgtgtgtgtgtgtgtgtgtgtatgcgcacactagtgcactttaaattctgctagagttttggtagtaggaactgaaatgttttgttttgatcaaagctatataatcctcttttgtttgtttgtttttgagaaaaggtttctctgtaaccctgtcctagaactcactttgtagaccaggctgacctcaaacttaagagatccacctgcctctgccctctgagtgctagaattaaaggtgtgtgccaccatgcctggtcaaagttgtaaaatcttaagagagggttttcttgggaagagaaaggggttcagttggagggggaaggacatgagaagataatggtgaagcaatgtgatcaaagcatgttttatatatatgagaaggaatatatttttaaaagcaatgtaatctcctaatctctttaaaaatagaattgtgtctcatgtgtctgggataattctagcaccggggactggattgggactcttgattctgtaattatttgccagagaactgacaacaacttttagggactgacccatagggaagagagataatggggtaaatagctaatcccacagaggccaggggatatctgaagaacgccctcagaagggaaggctatgcagctggacagtggaggctaccagggggaaaaagctaacaggcacagtgaaaagtttctacataccgataagcctctccactgatgcagcaacccaaatcagaccaaatcaaaccaaattagaaaaagcccacgtttaatggatacaatgctcccagatggccttccagtcccccagtcccccagagaggagacaggccagtttaaataccctgtgggagtggtcttgagcatctctgggggagggggtcatcatttggtgggctgaaatactgcagagtttgaagggagatgggggagggggcttgggtggaatttccaccataacatcccagactctttgggtaaatggatgccaggggctggggtgaagcttccactttaacacacagaatgtgtgtagacacaaaactcaatttctatcatttctatcaacacactggcaatggtgaacactgtctgaatgctctgtggaatcagtccttccagttcactggtgtcaagcaaccaatctgagcacagagacactccacttaaacggcatatgagggcagtaacagcagtagcacgagacattctcatggagcctaatacaaagagtcaatgtgaggatctactcttattttaaggtataattcaaattggactttaatatattgtcccttttaaaagttgctgctgctttaatataaatgtggttgaccacaatggcaactttctcttaaaatgcagaaataagcttatgtttgcttctccagggtcattttggggtcgaatccccacaattctggctttgcagggcctcctgcttcctctttgctggtgctgttgcaggcaggtggtccgtcctggccaagttccatctacactgcgtcgccagactccccacctccctgcatccaaacaaaatggcataagcaaaacaaagtgtatcacttttattgccccagaaacagtagcagagggagatatgattagtttgtgtagtttgggctacacaagtaactggatggtctgaaaagataaccagggttctgactttgagtctacctcagtattctttccactctggccttccctcaactatgagtccacagtgcccggcacacatatcagaatagcttgtatactaaatattaaatatgttgcttgtaagcatactgttttgtatttttgtgtgtgtgtgtgtgtgtgtgtgtgtgtgtgtgtgtgtaaatgctgggtatatacatattcctatgtaccagcacccacagaggttcgaagagggcattggatcctctggagctggagttacaggcagctgtgagcctcctggtgtgggtgctaggaacaaaactctggcctgagaagagcagtttaagtcttggctgctgagccatctctatagttcatgacaaatgcttttatttatccatgtgctctgcagtcaggtagagagctatgaaatatttttaatgttaataaaaagccttatgctaaaagatggtctgcatggcttcagagatctaggtacaggacagagttcccttatcttccagttctgtgggctacctgtctctgtgttcatcttcctccagggtcaagttgtttcttgccaccttgagagacaaatggctgaccaacttaacactctcacaaatgaggtaactcttgaatggagctggccaacactcaaaaggacagataatagatttgttttttttttcatgtatttcaagtctatttgatatttcctggttttgatgaggagagatttgaagggaaaatgagacccaaggaaatttccttagcttgtttgtgaaagggctgttcttgctggccttgtttctcttgctgcacttttgagattttattgcccacgtgaccccctgtatagttgaggaatgtacccaggaggtggaggacctgcttttccagccttctctcccctgggaaaataagtatggcaaataaggtgatgatgctcatacaaccagccacattttgtccctgcagacacagtcaagggattacctctggcgttactttcattccccaaatggtcctgtccccaaagttcttagtgaagatgacaagacccagtggctagaatgttcccttccaaacacaacatctttaggggcttcccagcaagcacacaggtgtgtgtctcaaagcgtgaaagtgcaccgtgactggttttccaaatgaagctggtacaggcggctgtttatgtcacacagcttcttttaacctagaatctaagagggcttaatgagaaagagcctgtcaaattctaggactctaagccccagctcttgtttctaaggaggggacacactgggttgtgcaattagagaaaaccagagtgagctttcgtcatgcgacatgtaatgcctcagagccaaatgatgcagtatttttagttttaattactggtttgttctccactctcagccagcccagcgacctcccttgctttccacccagaatcttaatacagtctcttcccatagcttccaatttgctatgcagatcttcgtggctctccaaacactctcacttttttgcctctccagtaaaacaaggagaggcaaaaaagagatcaaaaccaaatacacatgcaccttccgctccagggacaagagcttaacaattttctaagggctagagtgaggtaggagggtgtaaaaaacactgtatcctcccccaaagaggcagtttccgacttcaaaaatcagaggcgataaaaatatcttccgagaacagccagctgtttatttataaacctacttgtggggaaacttgctttctctgaagggattttttttttttcacgaacatgaggcgtttggatgctaggggccagagatgcagcggataaggaggatgatggattcctgggagggacagtataagacatcctgggtatttggatccaggaggccctgggcttcagccttttctacgtggccccaagaggaccctcttgaacagctgctgttctgccggtagcccagcagatggtggtgtgagcccaggaccgcactccaggcctcgcgctgagcccgcgccccccgcccatcgcagatggcttaatcagggctcggtcccccgccccatcagggccggcgctgcggacgtggagccaggcagtcaagtgttactgcgtacagcaggtagcctggcaactgcgagcataatacggagcagatggtgttcgcacggcgtgatggacatcacacacgacagcctgagacaatccaggaattccctggtggctcagggccctctttgcacaaaatgagttctctctccatggacctgcctcttggtggtggtggcgcgcggggggggggggggggcggggggggcnnnnnnnnnnnnnnnnnnnnnnnnnnnnnnnnnnnnnnnnnnnnnnnnnnnnnnnnnnnnnnnnnnnnnnnnnnnnnnnnnnnnnnnnnnnnnnnnnnnnnnnnnnnnnnnnnnnnnnnnnnnnnnnnnnnnnnnnnnnnnnnnnnnnnnnnnnnnnnnnnnnnnnnnnnnnnnnnnnnnnnnnnnnnnnnnnnnnnnnnnnnnnnnnnnnnnnnnnnnnnnnnnnnnnnnnnnnnnnnnnnnnnnnnnnnnntgctgttgtaggggacagggttcctctagccagagcagcacaaagcctgtgcagggagggaggaaggaacctcagctcactttatgcaccgcgtggcctaccagtcgcccaaatgaaatttagggttttcgttaaaaagtcccctggggcgtaatttagcctcttcaactccagcctatctgcttacaagtcctcagggggctcgggctaagcaggagtggggccgggagctccaggcttggccgagagaggctcactgcttggtaatcctaacaaagaccaggagctctagggcagggcgggtgccctggggctccctggagaaactcagccttgagctctggggcgggcacactgcccagtgtcacaactccgagattacctgtagcctggagaacaccggataaaaggacacataaacagaggtagggctgttgtgggtataaagagttggaataaaacaataagcaaacagaaaggatgcctagaaaacaaatctctcccccctcctcccacacaaaccgaactagggcaagtaataaaagaaaaaaaatcaaccaatcttggggccaaataaatttttgactaaattctatatatcaaaagatttaatatccagtacttagaggctgtctgcaaaggcaagttttaagtttcagaaggctagggtctacagaaggtgagagctaggtcacacctgcccagcaaggttttagcacttccacgtcagctagcagcaggcaggatgaattcatcacccaaaggacccaggttgtgacttccagaggcacaggcaggctatcttgtctctatccagagtcccttgaaatgaaaatcacgtttaaaagtggtcattgacaatgaaaactttggagatgaaaaaagctaagcagatgtgaaaacctccacgttctgcaggagcaatttgtgtactgcaatgggcaagagcacagcttctcaaagtgtggcccaggctcaccaacattagcattccccaggactatggcagaaatgcagattctctggctccagcaggccactgaatcagaccaagttctccaggtgctaccctgtagtagttcgggaattactggagcgagtaatcctggctgattgccgcctggtcctgatttgattgcaaacttgcattttcaaaatcaagcctgagtgtgggtttgctctggttttagtgcaaaatcttctgcatttagacttaaaactccccctccctgcacagggttggtcgggtcagcgatgtttgtcatggagacctaagaattctcaagggaaccagggatcataactcttcctagaaggatggtattccagttcagctgtgctctgcaagccaaagggtactcaagactaaggaatgggtggtcccttgctgagggacagcaccaagaatgccctgaattcccctaggctagaaagctactactgtttgacaaatgtcccctttggtttgaaagggttcttcaaataaagagaggacagggccacaatagaagatgataaagaacttgtatgaggcacccaatataggtataccactctgctaggtgcatttacctatgtaatcaaatgcattccgttgattagaaagcacacgtccccgagaggttaaggaacttgtctgattatcctgcagctggtggcagcatctttgggatttgaacttttctaccaccaaaacatacatctggtcgtaattgagcagaccacccaggaggactctggagtaaagagcaaggggaaggcaagggaaaaggatggacacagactaaaaagggaggaactattagaatcaaaggtcaaagaatgaaactaaatgtgaacaaaaaagacatttttttattgttgcctgagattacaaattgggatgtctctgtgttatcaacttcgacatttaaaaaaataaaagggcagaagattaggccattcaaccgtaagtgggaagatgaaacaaaataaattaaaatccgagttccctctgaagtccatcaagtgtcagggcagaagcatggcctcaggatggtggcaatcttgtacaaattctctttttcaagaacattttttccactgtgggtttggaaagcaacttattacaaactcccatgagagccccaacagccacccccaaacacccctgtttcataagattactcaagaaggttactttgaaaggtttgttttgatctgggtgtgctggtatgtgcttgtagcagtagaacttaagaggcagaggcaggaggattacaggttgaaggctatcctggactacacagtaagacccctgttgtttgtgtgatgggtggtggttgtatccctccaaacagttgagttttaagactctgattatcaatttaggaagtatttcactcaagcagtagtaactaaggcctggttctactaccaagaagctgttttcctagtaattcaggtcctctttgggtccatgatcaaacatgttgatgacagaacaaccttcttctggttattactcttattgttggagcatgatctctctcagagagagatagagagagacatacagagagatgcacagagagatacacacacagagagacagaaagagagatggggagacaaaggttgatgcaggctcactactctattgttctctgtattattctggacacatgggttgggctagactggctgaccagcaaggtcttcctgtctccatctctccatacctgagattataacctttttagaacctgggaagtggggatggagctcaggttgtcaggcttgcttggcaagcattttatccactgagcttcctgaggtgttttcgtcctccaggatggggtgagtgttgtgcttccagctctgttctaccgaagaggaccaggactttcaaattggttttctttctagatttcaatgagcagacgttgtctactcacacaccaaagagaaaaaagttgtagtcacaaaattttcatctacatattggaactacctgaaacaaactacatgcatatgtacacagacttttctcttactactattccctaaacaataatccattaacaactatttatataacatttacacttttaaggtattacaagtgacctaaagatgattcaaagtatatgggaggtttagtaaggtatatgtataaatctcatattttatctacctatcatctatctatctatctatctatctatctatctatctaatcatctatttttgctttcttgagacagggtttctctgtatagctttggagcctgtcctggaactcactttgtagaccaggctggcctcaaattcacagagatccacctgcccctgccccctgagcactgggattaaagacatgcaccaccaccaccccacatgtgtatctcatactttagataaaagacttaagcatccatacattttgctgtgttggagtgtgtgtgtgtcctacacccaattccccgaagattccaagggacgactgtattgaaaacatgcatgttgagctggagagatagctcagcagctaagagtgagtgctgtttttgcaaaggaccgaaatccagttcccatagccataccaggcagctcacaaacaccagtaacttcagccacatgatctagtgcccccttctggccaccacaggcacttgtactcacatgcacagatacacatatgtatgtgatctaaaacaaaaatctttaaaacaggcctgcttccaaacacagaagttttaaaagtaacgtagaaaagtagaaaaaaagaggtaatgcttgtttataatattccaaggtaactgatgttaatcttacaattgcattcaactttccccctcctttccttaccatttaaaaacatatctttatgctcctgatcatgacatatgtacggtagtacatcctaccaagtcaaacccagcaaaatgggaaaacagaaagttccaactttccaaatgcttacaagttacaatttattggcaggatgatactttattgactcattccagcagggtattttgttcttggaggataaaggcctgtgttttttttttttttgtttttttgtttttttgtttttttttcctccagcatccagcacacttagaggcacagttgccacaagctaaactttctgaatccagctaactgcgcatgacgaattctagcccaaaccaacaagggtatgggagaaagatgtccttataaacagactgcttatttgggcatctgctggggcctctggtgaacagtaagaaagggttaaagttggcagcactctgtgaagatgtgagggtatgcaaccaagggaaagggcaggttttcaaggacattcttggacattagaaaaacaacaaataccagtttttcttgtcagtgctttgaccaaagttacaaaccctgcctgcagtagaaacataactctgagagttaggcctttcctctgcctttgatgtaaattatagagtccttttgatccttttgtctcatttaattccaccaccaaagcaactctaaattggttaaaagttcattagtgtacaacaatagcagcttgattaaataaattatggcacatccataccatgaatgtgaggcagtcaataaaaatcatgcctcttggactgtctaatcatgtagaggaagcttgcaatatgcagctgacagagaagaaataaacaaaaaaaatatctgaaacactagccacagctaatattgtcagggattatgagcaacttttttttctttttgagacaggtcttcctctgtagcccaggctggtctgagtctcgatatgtacatcaggctagctctgagctcacagagatcctcttgcctgcctcctaagtgctgggattaaagatatgcttcactgttgccagcttcaatttttatcctttaatttttttatatcatgaatgtatgatacttttaatttttaagtcacttaatttattcatataatttatttatttgtttgtttattatgtgtatgtgtcagggtatctgtgagccaaggcatgaaaatagagcccagaaaataactctcaggagtgagttctctccttcttgccatacgatcatggagacttaactcaggtggttaagcttggcagtaagaaccttgacctgctgagcatgaatgtacttgatttttaaataaatgttactattttgttgtttgtttttgttttgggacaaggtctcctgtagcctagattggcctcaagtctgctgtgtagcctaggataaccttggtcctcctgccttcatctcccaagtgctgggatcacagatacgtgtcaccatgcccacataagtgttactagtttgacaagctcattaagagtgagtctaaactgatgtggtcctgaacatagttagttcatgaaggacccaggtcacgtccagcacatggctgcctcccaagtctactttctgctctgcataatgcaacagaaagctttcaaggcctagaacgtctgtggagctcggtctggctaccagatccatagccagcctgctctcaatacttcttcagaaaggcctcaaatgccagaaaaggctcaggaaactgattgtcttccaaacacagctcatctgtagtggaactattctgctctctgtagcttttcttcattataggctcaaaacaaagagatggctagggccacagagtgagccaggcatggcggtgcatgcttgagatcccagtgcttgggaggtggtgggtctctaagagctccaggctggatcagtttctttctatggctgtgacaaaatacccaaatggaaggaaggaagggagggagggagggaggaagaaaggtgtcttagttactgttcattttccacgaggaaacaccatgaccaaggcaatttacaagagaaacatttaattggggacttgcttacagttttagagggctactccatgatcttcatggtgggaagcagacagacatggtgccggagcagtagctgagagttttaccttctgattcacaggcagcaggcagagaggttgggcctggcatgggcttttgaaacctcaaagcccactcctagtgagacacctgacaaggccacactttctaatccttcccaaacggttccattccttgatgactaagcattcaaatatattcgcctataggggcattctcattcaaaccaccacagaaggggtcattttgcccatagtctgaggggacagtccatcatggtggggaagtcattgcagcaggagcccgaggcagctggtcacaccacatccgtagtgggagggcagacatataaaacactgatgtgcatcttgtttactctttctcatgaattctgggatcccagcccaaattcagggtgcgttttcccacctcaatgaacccaatctaagaactccctctcatgatgagctgggaagcttgtctcctaagtaattgtaaagtcagtcaaattgacaatattagctgccacagaggtcaacttggttagttcaacatagttagttcaaggtcaggaggtttacatagagacactttgtctcaacaaaagttgccccgccttggtggcccacacctttagttcctgtactcgggaggtggaggcaggaagagctctgtgagttcaaggctagcctgttctacagagtgagttccaggacagtcaaggctacacagagaaaccctgtctcgaaaaaccaccaccaccaaaacaaaacaaaccaaacaaaccaacaaactaaattactagttcgaaagattcaggaagatagccacttggataagtcttctctagactgtaacagaacctgagcagccagggctcaggacaatgctgcaaaggaggctagcccagcttttgaccccatccaagaggctgccctccggagtcaggatacacagactgtaaatggcttgtcaactattgttagggtctccacccatccactttcaactttctttcttcgatttacaaacagggaagggaatgatctcagctgttgtctgcagctaggaattttttttttcttccttgagctctctctcataatccagaccctcctctcccggccttctgatggagttctcaaagccaaggttgcataacggatacacaggcctatcttgtgttatactgggagactggccaatgtttccatttatagacaagagcactaccgagctgccaaatggagtgctgtgctgctgtggctacaagatggagaaaggaaagagcaggagcccaagacttaaagggatgccttgaaccttcccgccagcctggggacagtgactgaagagacttagctctatgcatctcagagcagcttcttccaaatagctatccactcaatccccccaaacactgccacaggacactcaggtcagcctgctctgctggcctcatgacaacaggaaccatctgtaggcagactatgggagcacatgaggctgaggagagggctactgtggaccgctgtcctttgggtaagccatggtggttgccttcttgaactcagtagctgtgattagcagaaggtaacatgcctcagacaggacttgttaacattccattgtgcaaggggtggggctcacaaggtcccaccctcctgtggataaacaaattctgttgctgggaaagtgagagacattttctttggtggaatagctgcttgtaagttgcccacactcctcaaaaaccctctcacctctgctcctgtaagtgccattagttaaattcattggttcaccaaaccagaaggctggttgacatgagaaggctgggcctcagacatgtaaaaccctttgaattttagcttttatgcatattctgaacatgtggtttgacaacagggacattttggtgagattgaaagataacaagcattttcctactttacactgtgtcctctgttactcaccagggtgttctatgtctattatcaactaacgttcttctgtgtatgctcatgtatgtgcagctgcaggtgtgtacatgtaggagcaggctaaggacaaccttgggtgttgttccctaggagctgtccatcttgttttctagaaatagggtattccctagaacttcagcttgcaaatttagactaggctggccagccataaaacaacagggatcagcttgtctctgtctccccagtgctgggattaaagtacacaccacgtgcctgactgatttatttgttattatatgtacacatacacaagtgtatgtgtacgtgtacacatgttgtatgtgtgtgtggaggtcagtggacaatttgtggagttgtctttctgcatagaaccttttcacataggttctagcatcaaataggtttttaggcttgtgtgacaaaaaacctgctggcccatccctagtatttttttatgtggcttctggtgtgtaccaccgtgaccagcttttaaagaactgaatcctgggaactaaactcaggtccctgtgtgtgcaaggcaagcacttcgcccactgggccatctctccagctctcaactaattttctttctatatgtgctgcatgttagagaatgaaatcggtgctttctcccacccttcttagccctaatagcattttttgttcattttataaacatacatatgtagtgaatctaaagaatcaaactagtccaagcattttcttaaccttgagacttgggggaaaaaataggataaaaaacagtttgggaggaaatgtggacctcaatgagagtttcctagtcagtaggtgatggttagaatagtacatggtggagcctggatggaggtgtaggactctggactcaagagctagctggcctggttggaggtgcaggcctctggactcaagggctagctggcctggttggaggtgcaggcctctggactcaagggatagctggctttgcacaagacagaaaaccctctgcttctatttcacagcaggatcaaggctaaaggagatctgactgggatcgtagatggaagtgtagatttctattccaggggaggacaagagaaggggtagttaccgaaaagcaagggtgaggtgtttgtctaggcgtgtgggaaaccaaacttgccagtggggtggggacaatgactagcctcacacaggcctggacacaggcaagacaactgatgtgaccaacgagcaacaggagcctgggtaggctctcagggagtcgataagacgataaatgcatcgctctaagattgtcaagtgtcaggtagggcagagattagactgggtctggatgaggaggaaagtacacaagaaggatggggaggtagcacttgggggtggtctggccaactgctgaggtgaatctggtttcttactgtggaaactgagaaggataaatcaagcctcttgcaagatattatccagtaaagctgcaagacctctttatcacatgcaaaggccactttctggtccactgagtcccacctcctcatgctcacttcctgtctgttatttcccctttggtaagcccatgtgactactagagatgtggcagagatggtaagccctacctacagatccattgtagacctaggtgtggcagtgcatgccggtaatccataactcaggaggctgaggtaggaggatcatcagtttaaggtcagtctgtgttacacactgaagccctgtctcaaaattaaacaaataaaacaagaaggtcgatgaaataatcctagtgttccatgtcctttccagtcttaactagctcagtgcatgaactggggagatagctcaagggttaaagtacgtgcctggtaagcacgaggcatagagtttgtgtcctgagcacccatacgaatgccgggtaggtgttgtggttcacttactattccagcaacaggaaggtggagatgggatgcccagagcaagctggcccgctagtttgctgattagatggttagctgtactgccaagttgtggattcaagttgagagaccctacctcaatgaaaaatgtggaaagtgatcaaagaagatgggcctccatatgaatatacacaaatgcaagtgggcttatgaacacacatacacatgcacacacactcacatgcgaatacatgtatacacacacccatgcacacacacacacacacacacacacacacacacacatgacaatgtgtgtgaaaatacaattaccacaccatgtctaaaatactgtgtgtgggtggcttttaaagggactagaaagtatatagcataagtaggtacatgtcctgagtgttttcaaagccctaacagtatttcctggggatgaagggaagccgggaaacaacaggaaatcagatcaaaactaatttgagaggagggcaacttttaatttgtgcttcttttacttggctccccaactttctacttcatgctaaatactttggttaatgcctatcaaagcctggcaaggcataatgaaagtttgggggctgcccaatttgggttttaacaaagtggtcttcataacaaatgtggtaactagttatttcctaggcttaagctcactcttggagagaaacagccagaaaagtacttggttcttattgctacatcttgttcacaacagaaatattgtgctaaatatttcttttttcatttaaaaaataatgcttaagctagcacgaggcatgctgtattttatgggatagtgttgcccttttccactaatttttaaaactcaactagagatggtgattaaaaaaatatttgaacaaaacagtaaattagaatggggcccctcaggtcactgaaaattcctaactgaagctaagaatctgcaggaggttctaggtaaagcttgttttctaatttaagttggtggcctagagtcttccattgaaacacaaaacattttccctttgaaaaatcttccctttcttagatgacagtggggtgaagcaaagcctgccattcataacactaaaactctcttgctttggcagcacctgcctgggtctcccactcagagaggaggaattacaaatctctcaggctccccaggtccctgctgccagggtctttcccacactggcctctgtaggaacaaaattcctcagatggttgacaccagccaatttgttttcctttcccctcccccttcttttacccctccctttctaataagctatattctgcccgagcctctcaaagtagccaggggccagcagctacagcctctccttgtctgaatgagcctcttctattctgggttctgcctagtctgtgttctgaaggaagagaggaggcttgagctcaaaatatatgggcagaccaaatgtgtgcttgtttctttcctttctctgagacgaagtgttgctgtatgaccctggaacttgtggttctttgggattgcgggaatgttctgcagcacctagtttaaacattatttttgtattatggacctacctttcacgaatcctgaggagctgaaggaagtaggcaagtgggaaaataaaacccaaaggtaaacctgtaccactgaggaaaacaactcagggtgggagggaggaatggaaggaacaggagaagggcacagggcacaaggcaacagtttccctcttcaggataggatgtcccctctgagcatttgtgtgtctactttagagatggatttggggtgtgcatatttgaaaatctcgtatgagggctgggcatataggtttagatgcacaatgattacctagcaagggcctagattccatcttcaacaccacacacacacacacacacacacacacacacacacacacacacacacacacacacacacaaagaaataaaagtaaaaaaaaaacaataatactccccccaaatactgtaggtgatatttattccttgtccacagtattagtcctatgcctgttacttaaacaaaatgaaacaaaactgtggatgcctgtgtgtgcctgcagaattcagaggtcagttagggttgggtgtcctgctctgttactctccaccttaatttttgagacaggacccccttcttaatctggagcccattgactgtctggatgactggcaagccctcctccatctctggccttcccttcggcgctggcttcacagatgtgcaccgccatgcccagcttaccagtaaaggctttcccagctgagtgatccccctagctattatgcctgatacttctaacaaaatattttttaaaaattctttcttctttcatatattgcagactgactgcggtctctcctcctagcctcctcccccatatccccttctccccaaattaagtcaaactaccttaggaaattgggcaattcttagattgtgagaagactgggttaggctggcgggggtggggggggttagaggaaggtctcaatccagggtagtctacaggcagccattttgaaagactgcaaacacaacatggctttgtgttttggtcctcagatgacagatcatcttggtgactcagtgtgtgcaccatttctggtcctgcattttggtgaacagagggtggataagacctgtaggtgcatgagtcatgctcttaaagttccagagtatctaagtttttgtctgagttctgtgacggggtcaacaacaacccagcatttctacacagacttcaaacgtaacacacatacacacacacacacacacacacacacacacacacacacgtgcgcgcatgcatacatgcatgcacgcatgcactatatacttatacatgtagactcccatgtgtgtatggaggctgaggaccacttcaaacattatcatgcaccgtctgcttttcctttttaaagacaggtctctcattggtctgccgctcatcaaggtacaatggctagtgagctccagggaccctcctgactctgcattcccagagcaggggttataatgtcatgccaccacgcatagcttttttttatgtgggtgctgggtatcaaattcgtgtctcttgaaggactttattgactgagccatgttaccagctctgtaactaatattttctccccagaaaagactaggaatttcctcaaaatgggagaaaaattaaggaatggtttataaatatatagtttctatgttcaaaagactgaacttctgattataaaaagtaagggcgatgtttggatctgaccttatggtcctaatttagtgttttaaaatttttaatgtgtatgagggttttgcttgcaggtatgtgtgtgcatcacatgcattcctagtacctatgaggtcagaaggattccctaaaattggggttgaacttgagtcctatggaagagcaacaagtgttcttaattgctgaaccacctctccagaccttatgctttcagttttgaggtttctttgcaattacacagatttttgaaaatgaagcatacagtaatgctaaaatattgaaaagttttcactaagagatgctactactcaagtaccttggggccacagcacaggtttggcagcatgaacagtgatgtgcacacagctcctttcttgcctgttttctcacagatgcaagtgagactctgactgttctagacctgggccccacagagactgtcctggaggcaactgtaaccattttctttggctcatgagctctagctactatctatgggacagagaggtgcccataagaggaatttgagagacaggaatctgtcaggacatataagagggctccacactgaggtcatgttcatgtacaagcatgcagcacttctgagcaaatgctgtcctcacgtggaatcctcaaacctgaggcagtgatgttaactggtgaggatttcactcaactgtggtaaaaaacaggagctattgctcctcggatatgaatcatacagagtctctaagtattttacagttaatctatattactgtcatttctttatctctttgtgtactccatagtggagctgaatgagaacacccattgtcctaccttgcatgcccctacccccagagtggaattcatgttacttaaaaaaaagttagatggcaaagaaacaatttggatggtgacagtgaatttggttgtaacctgaagtgccaataggatgccaaacataactgcggaaagcccaagaaacacagaacgctctggaattcatctgtaagaattattctctggcatgatgaggtagcctggtgcctcccacagctctatggaactgggaagcgagaggaacagcccttcagccctagatgacattagaagctttacaaagttaatgtggggtgtcatcctccagtttcagtaaaaatcagtgaaaggagggaaggagaggcctcctaggccttgtggttgggtgggtggaggtcactagctttcctgaggacgtgccagcagttgcttcctctgaattccagctgaattcaagccaggcccgctctagtagtggcctctggggcagttgggggctctttgttccttagagacagtgagacttaaatcccagttgaacctcagacttagcaactgaacctcagctaacccatgttgtaccatgtgatgaaacctgaccctctggaatccaccctactctgttcactcttctaacccccccatcccatgcctacatttgtggagcccataagaaaataaattaaaagagggagttgggtcctcttcaggctccattaatttccttgtatatattacctagaaaaatgtgctccctaagacctgttttatttattttgagacaagggctcatttagcataggctggtctcaactcttaggtagcagagagatcttttaacttctggtccttgtctctacttcccatgtgtcagtgttataggcctgggctactatgctggccttgtacattttaaaatggaagttttcacatggggggggctgttttgctcctagtctcagattaagatgaaaacatacagtgtttataggcaggtggagaaaaaggcactggcttcagtttgggacaacccaagttttcttccaggatctaactactccttcccaaagcagcagcctctgcatgtggacagcactcctcaggtgggaggttctcactctaggttgccatggagtttaggccaagaacaagtgtgtttatttggaggagggtgggtgggagggggtgcagggtctcactaaagtagctcaggctggtcttgctgttttgatctctctgcctaaaccttctgagttctgagattaaaggtgtatgccaccaagctaggctgaggatggatcttaaatatgagcgtagtatgatttaccaaatgacaaactactactactttctcttcctcctccttcctcttcctctccttctcctctttttctgagatagggtctctatgtagccctggatattccagaatttgctacgtagaccaggctggccttgaactcaaagagatcttgcttctgtctctcgagtgctgggatttaaggcgtgcaccaccatgcctgactaacaaaaatgcttcttaaatctttgtcccacttctttgtcttaatgcaatattttccccccaaatgaatttagaacctttagaagattgttgtacctcaaatattacttggaatgtaagaagatgggctctaggtacccagagataggactttgtgcagggaacgagatgtgggttaggatagggtgggtagggaagggtgggatggacaggggatgaggggtgcagtggatactgacataaaccccacccaagccacaatttcaacctcaaaagatccatttttgatttctgcatgcgagactacagtgtgtctctttttggtaaataaaggtacccacccaatgcagtgacctccaaggaacctgatgtagaaggaggcctttcttgcctttatttccactgtgatctgggcccagaacagaagctggaagtctacaatttcctgcctgatcctggaataagaagagtcttcctcttggcctgtgacttggaggttcacaattgcccttaccaatagatattcaacagtttcctcaaaacatcacagatggctatgctcagggcctccccagtacatcatatttaatcagctctgagactcacgacattgaaggcacatactctgtaccactagaaaaggctacccctaactatggcatagcatccattgtaggatgcttactgaagagtggagaagagtgtttcaggatcatttagagaggccccttagtcatcacaatctcagaggccctttagcctctaaccaacaactagcctggagtggtcacttggatctggctggctctgttcccgcctttgcagctgtggaaagtggccaaggtcctgaggacacttcaaagccgggttctcccctcatggttgcattcagagaagtgcttggaaaaacacattctgcacttctttgttgaggatcaaacccaggatcttcaggatgctagacaaactttctacaactgtagttttcggaatgatagcaaaacaagacaaaaagccccatataatgttgtacatatttccccaagagaacatgtgtacagacaagaagtagtaagaaaaaagatgtggcatttcttactcagaagagaacaggaccagtccctaaatgatactggcttgattctagaagaatgaatgtccctccacatttccagtcaccagctgcttccttatgatggtccatgccaagggctcaaggaaggaaagaaaatgggatggttgcacataggctatctgctaagtcaagataacgggctacacacaaacctgaggaatttatcctttctgtcttcacaaagacacagtagtctgagtctaactcagaagaggttcaactagtaaaaaccagatatataggaagaatgggtgtcacatgattcaatttctgtttttctttccttttcacattgctaaaatattcacaacataaaacctttcattgtaactacttttgagtgtacaatttaataacgttaagtggatccacaatactttgtaactatttctactactttcaggacttttcatcattccaaacagaaactttgtacatttcaagcagcatctatttttttgttgttctagaagcattttaactgctattaagggtactgatataaatttggaaaggaatgtgggaaatgcatgatgggaaaaaactcagagtgaaagttaaaaatgttttcaaatcttgtaagtgaactatcatcaacgaccttcccagtagaatctaaaacttaacgtgaaaacaaaatataattttacaaaatgactaagggagaattgggcaacttcaggccttttgcgatccttccttacaaactcctgtgaatcgggggttggaagtcatgagttcataaggatgtttaaggcaaatagagctgacaactaaagcctggctgatcaattctcttccccatccacccactggtccccctcccctctgtctacacagggtcagtgtcagcccatgctaggcacaggggctaccaagaaccatggccactggctggctctcaaggagagctcccacataggagataacggattaacaaagagtgtctaagtacgaaaacacagatgagggggtggcaaattatacctggggactaagatgggtagggaaggagttactaaaaaccctctttgcctagtgcagagttaaaatctgagattacctacttactctgagtgtatgttatgagctgcaaatacgaccaccttggagtgtttgtgacaacgacagtagatcagtaaactataaatcaggtatagtgtacaggcctgtaatcccagtgcttgggaggtagaggcagggggatcaagagtttaaggctaccctaggctaactgaggacttgtctctaaaaaaaaacacgaaaaggaaagaagagtaaactataaactggtgtgtgccttgtgactgcaactgcataaaactgaaaggagtgcttgatacaaaacaagccaggcagggagtctattatgggtgcttaattaataattatttttttttcaagacagggtttttctgtgtggcagccttggctgtccaggaactcacaatttaaaccaggctggcctcgaactcacagagatcatcccaagtgctgggattaagggcatgagccaccatgcctggcttaataattttaacatgcacttatatttatttttctgattataaatttttgttttgattttttgagacagggtttctctatgtagtcctggttattctggaacttactttgtagaccaggctggctttgaaatcacataaagatctgcctgcctctgtctccagagtgctggattaaacacgtgagtcaccactgcccagcactgactataaatttatttgatatggaaaatctgaacaacacagaaaaacctaaaacaggaagatagaaggtctacaaaagattaccacaaaacagtaatgacttaatctctacccattattctcctgccaaatattcacctgaatgaaacaaagattgtggctgtattattccattatactcagctgttattacttgcttaaccaatggtctgttactggacattttgaatattttcaatttttcaccattgatttaaaaactatgtatttttgtgtgtgtacatgtgtatgcatatctttccatgcgtatgcatgcatgcagagtccagagacagatgtcaagtgtctttctccattgctctccatctattttttgagacagggtccctcactaagcctgaagaccacaggtttggcttgactggatagccagtgatatccagttatcactggataacagtgatatcactgtttctgcctccccattggtggaatcacaggtgtgtgttgtcatgcccagatttttacgtgggtgctggggatccaaattcatgtcctcatggttgtgtggcaactactattcatctcccaggttcttttatcacttattttaatatgggaagaaacctcactcttgtgtataataaactttttgtatatatcactgatgatttccttctagtcagttccaacaagtaaaaattctgcatcaaaacctgtgaacattttgttgtgctacataattatttttattattagttttagtgtataaaagaattgtttccatggcattttcacaaacattgttctttctcatatatgctcatccctttcctcctttctccaaacaggtcctctctcccccagcactggtattttttttttaaaagatttatttatatatcatgtgtacagtgttctgcctgcatgtcagaagagggcaccagatttcatagatggttgtgagccaccaggtgggtactgggaattgaactcaggaccttcggaggagcagccagtgctcttaacctctgagccatctctccagcccaagctctggtatttttaagggtctgttttggcatctctttctaaacagctctccccagagtttttcccaacttacatttccatgaggaacagagaagttctctgaattatataccttggactccaaggagtcctataatgatcatccagcacaactgtcttctatgcttccttcttaatgaacataacggaagacactgcaaacaagatcactgtcaaacacatggtcatcaagccccccccttccccgcctcacccccttcccaacctcaccccacttcccaacaccctgggtgcaggcgtgatctttgccatcactcagcagctagacaccctctctctgcagggaggtgaatgaccaaatgctacaaacactcttccccaggtgtgaaccgggattccttggctctctgtactgcagccagcctccatgtaacagagcaaaaggacagactggtttgttcttccactcaacagctgtgagccaaagtaacaccctccctaggctgtgggaatgagaagcacttggacaagcctggagaaagcctatctacttcagttatttggctgtaactttcaaccaccgtagcatcttggaccagaaggaaccatgccaacagtgacagcagtgaacttggaacccactcttcagttataatggcaacagcacagattcaggatttcaaattacttttttcctccctccatggatatcatttactgtaagagcacttcctgtccccatcccacccccaaataaaaggaaaacagggatgaatgtgaactattgcatctcagttttaaatgaacattgattgacacatctggtgttgctgatagaactaccaggggctgagaaattccatagaaaattttagctgtgtgaattttattcagtggatcaggacacggcaataggtaaaaaaattttaagacatgaacaaatgaaaacaagcagctggagagatggctcagtagttagaacactcgctgctcttgttgaggacctgggttaagttctctgcacccacacggtgcctcacaaccattggaaactgccatttgatgggacccaatgccttctttcaacctccttgggcacccggtacgtatgtggtacacagacaaacatgctggcaaacactcatacacataacatttaaaaaatattttaaaacccacaacaaaccccacatcgtgcaatatatcattcaagttcttttaagaacagattggtattttggttttttaattgtgtgtatatgcatatgtctaggtgtgggtgtgtgcatgtacctacagaatccagaagatggtgtctgatcccctggaactggagttacaagtaattgtgaacatagaagaaaagacccaaggagtcactgtagaatctaatcttctgttgtttttgctaaaagtttaagatgtggctacccatctgcatgtttagagattggatggggtattcacatgtgcttggccattctcatgaccagacacacacttggatctgtgacttggacctcctggaatggcccttttaaagtcagttctggatacatggccagaacatgtttccttcatctgtttaggctgcaggatgatgttctccatgttaccacactctggttccctctgccacttcccttttcatctttgctatctgctgacttgcttccctcagttcctttatatgatttacatcttcctccaggcttctgatggacaaaacaaaactctcatggagactgtcacgaactgacaaatatgccaagtgatactcctgcttccaaaatatcaatcatgcatccaaaggatgactgagctggaagagacctctgggcagtgtggtacctgaacttctcttgatgagaacagacaggagatttttgttagatgtttgtccatccatccatctgtgaaaaattactgtgatgggttgaaagactggttctaaactgaacacaatgcatttggagacagatgtccaacacatcacagtcacccagagagaaccttctcgctcatatgattcctctctaatccccgatgttcaaactgacatgcaagggatgagagaaatgtgtccagacaaaattcaggcaggggtggagcccaatggggatgacagagaaggaaaaaacccacaacggcagagtggtccagttatatccctagggaaacaatattgagagggttgggttgcaaccatgtactgccttgcatagcatatcaacacagcaaagtatgcaaaataaacagactaaacccactgcagcacacatgctggctcaaatggcagggacactcttccctgccaccctttatattcaccctgtactttccctggggctcagccttccttcttaccttgagtcagcattcctttttcaaaaacatagctgatattgggctattgcccctgctctggtgtgggtgacaaagcctaggacatgccacaaatgatttaggcagccaggcaagcagcctcagagttactaaaatgaattgtagtatcaggggctatctctagggctatgggacagttttgtttgtattttctttatctttttcctatttcctgtaagaagtattcccataagttttaatattttgggtgggagaggaaagtgatctaagacttaacagtctacatctgtggcaacggaagcaaagttgatgctgagaatgaatgactaatgggagatcagagtgaaccataaacacagaaccaaggtaacagcccacactcaaatgaggaggaaggtggccagcttctggagtgttttaggacaaaagattaaacacaggattttttgaaatgtaggaaagaaagaggccagtttgtggctgtcccctggcaccgtcagtcatgtgaactgtctcagacctagtcctcggatcgatgctgacttgaagttctctgatgggtaggatgaggccttgagtgatgtggacttggatgaaggcggcagatatgatgcaaagatgaagcgaaaatctgcctatggagtcagggagatgctggggcatcaagaagaaactctgtcaacagtagagttaattcagaatttaggtgaaaaaaaacccaaccaaacaaaaaaacaaaacaaaaaccaaaacaaacaaacaaacaaacaaccaggcatgtgagtttgggatgattagatcgaatatagattttgaataataacaagctagatttaaatggcagcatgttgggtaaactacttttaagcttagccttagagtaagaaggagaactaaggaaagcagacagcaaacacttagaagggcacctggaccatgggcatagggcattctcaataaccaggggatgtcattatcatcattattgctattagagacagggtctcactccatggcccaggctggcctgggactcaccatctattgcctcagtttcctgagtgctaggatgacaagtatatgctactatgctcacctccagctactattataaagattagaagtgatctgacacaggtttgtggtatgtagaacacccacaagagcaggaagagtggaagaggcaataaggctgtaacaccaacaaatatgaacttaggctgcagactcaagggaattgtactgcctgtgccggtcagagtcatgtggagtactgtttagcttgggacactgatgatttaagatgtgtgaggaggcctacgggcatccatccagagctgtgtgacatgacagaaactggacacatctggtaaggaaaaatgagtgtaacacaggccataactctcttgagatcctcaaggagctattattacacaggaggtagaatagcattattccacggctctaggagaaaaaaatttaaaagctctttagctgagtttgcttaacagaagagtaggtttttcagtagggtggacagaggaataggctgcttgattctctattactgcacatgctcagagagcctacccgagaatcacttagaagtgaagagggtggagaggacattctcttctttccttgcaaaatggaagccaccacggctcagtctcacaagacctttgcttgtcccattaaatcctgccaggaaggacactgtgttcacaaatctttcctatcaggatagagaaggcacagtgtcatgcagagatacacgttcatccaacaggtgctcactgatggaagtccacagtcactgtgccaagtgacagatcttcgaaaatgaatgaaataggtctcaagggcatgtggtgtgtaagtggagccctctttggatcctatgtagaggcaagtgctgaggtagagagtagcacaagggagcacattggaggttcaacttcctagtgcgacagggtccaggttggggttctgaggtagaagatctggaagctgaagagggcttgagtaagtagattgttcgtggtattatggtcagtatgtgcaaagtatcagaggtaggaagcagccctgtggccaggcagtcaggtgtagccaggctgaaaggtatagctttattggaaattgggtgagagggtcaggagggggccggagaccagagcactcagtatacacttctaaaggcctgcatgtcacacacaatcacaaggactattgatcaagcttcaaaattccaactagtctctggcctctagaaattattcaactgtttgtttagtggctctattagtcaatggtccatgactatgaccaatagaggggatactcaatctagccagagaataggcttattcttgttcatagttttgagggtttggctccatggttacctggcctcactacttttgaacttggtgaggcagcatgttatgatgggagcacacagcagatgcatagctgctcactacatgagatgccaatacagagaggaagaggaaggggccaaggccttactggtccttagagagcacactcttatcaaccaggtccccactctagaggattccctaactccaagaagaccatgggtctgggactaagccctttcacacaggcctctgaagaagatttagccaaaccagagcagttaccctgtgtggtgccttcatgagcgcaggagccctatctaactcattgctatattgctgttttgagactggtcctgaaaaacaaatgtgagggaacaggaaggatccaacctcacagggtttcaatgaggattcctgaaactaaatggcgcacacttagagtagtccctgtgcctagcaagcttggataggtgaaagccactgttattattattcatttgtctttctggtttacccttccttttgtgcctgtacttggttaacacacttttgggaggtggtgctgggaactgaactcagggcctcatacaggcaaggtgagtaccttatcacagaactatagcctcataacttgttctctacctttctattttaaaacagaggcccagagatggtggcacacactttttaatcccagcagttgggaggcagaggccaacctggtctataaggactgccagagctacatagagaaaccctgtctctcccccccccaaaaaaccccacaaaatagacagtggagttcagcgtaaattccttgttctgaagattcagggatgacagacagatctttctttgagaatccaaggaatttcttagggatgactctaatctgggagagatttctcctccaacaggataaggcctggaaagaccttgaacatttttcttctcattcaagccccagaaggtgatcttggggtgtcttcctgtgacccaggccccaggcaaagttgaagaatagtttggaatgaatgcggtgtcagctctgagctgacagtcaccatgccatttgtttaacagcacagtccaaaatgtatgtggcattaaaccattctggttcacactctagggcttttgaccagtttttgagtcagaagagaaaaggctaggtgttgaaggccggggtgggggagtggggagaaatggaaatgacttcaattgctaaaataaaccaaattacttaatctaactgaaacaaacaaatgaaaactgtttagtattagattaaaaacaaaagcaaaaaacaaagcttgttgctgtccctgtttgtgtggctggaccaggagggtatatttagtgtcatacgctgcagggttgcatcttgcagcccaacaggaagtatctggagtcacagctaaagatatccctgcatgtttggaaatttacgagcagctataaagtggctctatggtgggcagagggctggaacaggcttcctttcaaatgagagaggccgctgaattaaacactcaaatacaccaggttcgtggcaggcagagcacacctgacacgctaaaaataaccacagtagaagcttctgttgctaaaataatattgagctgatatgtgcctttccctcccaaacctcacaagggcagatgaaggggtggaggctgggtcctgagatttcacaaagggtgctagaaacctgtagaaatcaaagggagtcatttcctagatttggcactttccaaaaatgaccagcttccttaaaatgaggcaaccaaagtccgggtaatcgatatattattttctaataacacaagacagaaatggctgaaccaaacagaacttacacaccagtcctgctgacgagctgtgctgtagacaggtaagccttctccatcctggccaagaaccagttattttgaaacatccttttgctggcttcccttatcagcagcccccacaccctgctcactaatgctcggctggaaagccccacttactccatgcacacgagctgcttgcttgatgatatggaaaagggtgagtgtgtgcaattgcatgtggctgtggtgcaggccactaacctttacaggatgatctatatatccagggacaacctaacttctaaactttcattttgtgatcaaagacgacatggcttcattttttttcctcttccaattgttacctttggtctggggatacagtgcctgctgcataagcatgatgacccaagttcaacctccacaacccacataaaaaacatgattataatcccagcaacagggaggcaagagagggtgtctcaaataaacagatgacaatgacaatcaaaaaaggcagactgcctgggaaagaatgacacttgaggttgccctatggcttctacaagcacacatgtgcatgtacgcttggacacacacatacacacacgtacacacaataatgcacatgtatacacacacacacatgcacatgtacacacacatgtacacacacaataatgtacatgtatacacacacaaacatgcacatctacacacacacacacacacacacacacacacacacacacacacagacgttattttgctttctgagcacagtggaactgataaagaataccctggtgacctcaaaatttcttgtggtgatgaagggaccaatgcattcagaagcactgctgggtctgagggacgctgctgttaccaccattcctgggcatcttagtcaaggatgggtcagaggacagcagagagcactgagcacactgatctccatgttttcttttgtggagtggtgacattttaaaccggtcagagcaccgtttggatgtctctctgagcagtggggtctgcaggaaattgacctgctttgccctctccttgtctctttaccatctttgctggtctacactctgcattcctggcagctcactgtaggcagggctgggtctggttgttactgtggctcgcacaggctctgcaggctacttaattctctgatctgggaagaaagtccccacattctctgaagtgggtcttcctaaaaacttttgctttagtggccatttaagtagggagggtatcattgagtttatttggtcctttccctctcaacatgttccacttaagttaaaaactgtaacttcaccatgacagtacctgtgacacatggtcatgatcacacattctgcctctgactggagcttagtgtgacaaagatgaaatgacttgctgcgtcagaggatggggccacgaaggtttgtttcccttgttccctttttgcactgtctaaggttgttacacagtctttacaatttttttaaaacatattttatttttttgtgtagtgttttttgcctggatgtatgcctgtgcactgtgtgactacagtgcctgtgaaggccagaagagggcgttggcactatagttacagttgttagttgccatgtgggtggggggaaccaaacctggtcctctggatgcacaaccagtgctcttaactgctgagcatctctccagcctcattaaatagtctttaaaaataaagaaagagtaactgcggttttaacattttaaggaaatgccacacaggctaaatcatttcagtgaaagaattaaattctcagcatctaaaatattgtagaggtagcccacttcattgcaagtttttgttcctgagaatgtagtaagaggcaaaggatgtgcctcatctaaaaacttcagatcaaatgatggtttttctaattagaaccccttcagtactgaaatattgaagttgaaatatttttaaattgtcccccaaaggagcataagttgaaaggttggccttcagcctctgttgatactgggaggtgggggaagggccaagtggaaggaaaggagcacgctgaggacatgtctttgaggggatgagaagaccccgggtcttcctcttcctcttcctcttcctctgcttcctggccaccatgaggtgagcaacttccttgatcaaacactcccactcagatgtattatctcccacaggccccaaagcaacagttcaaccaaccatggacacaaaccttcaaatctgtgagccagaagaaggtttttacttttaaaagtgcttcatgccaggcatttactatagctataggatgctggctagcacagaagtcgacaatctttttattcaatgaagaatcacgtcgttgctcggcatctgttaggtgctgaacaatgcacaggtgctaggtatttacccttctccagcttctcccacagagtaccaacacaggttgctgataggggatgtccttctgtatatgtgtttctcttattagttgatgaataaaacactgtttggccaatagaggcaggaagataggcaggactaggagatgagaattctgagaaaggtaggcagagggagacccctgaaagatgccatgtagccaggattaacaggtctggacccttctctggtaagataagaccacataaaaacacttagattaatagaaatgggttaataattaagacagagatagccaataagaagctctagccactgggcaacagtttataattaatacagcatctccaggtgcctatttggggctaaagcagtgggacctggcaggacaagaaactccagcaacaggttgctttgtcaggcatcaggagacaacatcctccaggtatgactttctaagctctagatgccaagatagcatttgtgacaggaaccaccaacaatgtgcggctccttgaagaaagaagcagccatcaaggcttacaaagtgaagcttgtgatgccttgtgtggcaactagccactcttcactgtttcttcagggctgtaatagagtgggttcctgcccagaacttttttcttcagatggctttgaagtcagcagctcctctagcttgtttttttacagaaaagtccctgactctgacaaagagaagtagatgaagtcaggtgaggtaatggtaccagctgctgggcattcaacagacaaacagtggaaaggagaagagagccgatgctgggtggtatccggacccagactgtgagccctgggactggggttgtgtagtattacttaacatcatgaagtgtgaggtgtggctcctcatattgtcatgtccatgcataaaaaactggggatcatcatgtgtgctactcccatcctccaaaataatcacctgtgacctccattattgttcatttcataattacaccaaattggttaattaattggcatctcctttgcctctacagaaaacataccaaataaaatattcacaccacaataatgtccagtgggtactggtgattaattttaataaaataaagctccaaactggatcaacactttttggtggcaccaagggacatgttatgagagcaagcttgtcagtatccttcacaaatggtgagagccccaccccaggccacccagtttcctccaacatcccaccatgcaccgggcgtaaatcattttggaagctgttcatagctgtgttcttcccacttgtaagttagtgaagtcccacaagcttgtgaaaatagccacctaagtgatgatgcttttattcttttccctttgaatgtgcccctttcaggtgctgtcctgaggatatcattttaccatactggaatttagtggatgtgtccatagctctgacatttggagaccagagctccaatcaactccctgagtctttacaatcaagacaggagaatccaaacttttaaatctacccccataaagaaatcaatttctttaggagactggcttcagctgcccaactttgctgtggatttgcattaaaatcaatgcaaatctgtatgtgtatacaggcatttctctggagtccatctctctacaaaggttggaaactgttacccttcatcccgaggctccttctagaattttccttagttttgattagttaattattgagaccgaatagccaggatgatatccactagtccaaatgaggctatgtcaaaaattccaaaaaagatggttttctctgtaaccctccaccagaggatgcctgttatttggaggatttggagttacagcagctgccactgcatccaggtctttggggaatggtgtataatgatcctcatgtccatcttccgagtggaatattattatcccattagtacaacctaatttggattcttttccctagatacactgccttgtatttttccacactgtttcagctgctgcctgtctacctcttggctgccatcctgtcagatcttcaggaatttacataatgtggacttggctttatgttgtgacattgtcctctgcaaacgtgtggtgcttctgttacctccctgaacaatgtttaaacaaggaactgtccatatgatagtgacagccacacatcaccccaaaacatgctcctgtgtccacaggaaggcttcggctgggcagagtctacctggcagagaccacagtgcccaaaccctttgtgtctagatgggtccagagaaccagtctttgcagggatgtaaacagaggtaaaaggctggtgaaacatagtgtgtgtgtgtgtatgtgaatgtatgtgcacacaccgtgtgttaaatatatgtacaggcatgtgtatgagtgaatgtatggcatgtgtgtgtgtgtaaatatatgtacatgcatgtgcctatggctatgtgtgcataaatgtgcacatgtgttctccattatcttcccccatttgataccaggacagaacgaaccctttgaacccaccagagtcagaagtggggaggaaactaggttgagtcggtgtgacaccctggggggtgaggctgcctgctctctggggcgccacattgactgttggcaggtgagaaataagcatgcggtatcccaaaccccaaaccgtggtgcagcagacagcaggcagggggccactgttggaaatatttgcttcacagagagttcccgctccctccctccttcgttcaaccatgtccatgtctttttctcatccagaagaacaaggccctctttacatctgaagcaccttaattcgtttcagaaaggattttgtcaaagatattttttgatattttatgccatgagtttaaggtatttacctaaatagcaaggtttagtaaaagcttacacacctgaaaagtattttgatttgacataaacaactcatttcgagatttccatgtgttagtatttattatgtggctgaggctaatttggacttagcagtaaacaacccacgttttgactgacagtcgcaagtgcctctgcaggaaccaacaacatagacaagcagtaccatgtcctccgactgctctcggagtgtttagaaatgatgcagcatctctgtgagttccacaatagaggtgctttttgtgtagtgtggtactgacggatgcgtgggctcagggtagagagacttcaggttctgagagctgtcgtgatcctctgaggccaacaagaatccttgatatttcctctgcagcaacccacctctcctttcctcctagtcttctgataagagtttaaatcccttgctctgaccagcatctacacagagcacacctcgctctatcagaagaggacatggtgggatggagtctggctgagaccgcgctgtagctgtggccactgtgggaagagcctggagataaggatgaatagtccatgtctcctttaaagctaacctcttggggaactcactctaggaattccatgtccatcaaaaggcttggagaatgttccagatgggcaaaaaaaaaattctgggggcttcctacttcctggggtgtgtccttcttgcacagaaggtgacatccagagaggttctaggatgatggttcacacttatagtgatgtggtaagttaaaacaccctcccacaggacaaatcttaggctcatggaacagaaaagatggtgctccaattatgttctcctgaggagtttgttctgagctctacaggaaagtgacaatgccatggcagggacaccctagttcaccataacaagccttttctagggaaactaccttgagagcagcatcatccagaagaggaagagacctaatggcacaatcacaggaaaatcaacagggaagagacttgcttaccaaccaacaacaaagcttgctgatttcaaagactttctacatcagggctccttctctgctgtgagaattcagagacactcccaaaggcaccctcattacctttgcctatgaataaagcaaatggcggtgatgattctggcagtggtgatgtggctctcttttggaaacttctgactaagatggttagggtggaaactcttaggagtccaactgctacttccacagattggacagtgaccacggaaggaaaggagacatctccatcaccttagttcttggctttaaaagcactgttcagtttgtgttgccattaacaagcacccccaggctcctctgggggcatcaggaaaagagacaaggggtggttagggtgggagctggacagaatcggatgctgatggcaggggacaaggcagtcacttgtttggaaaattgctttgtttctaaaaagaaacctgacattttgggggtggggttagggcagggtagggacaggcttctctggagtgaagccagacaactgccatcttctttttagaagtatcttagtcttccacagtccacaggtgagcaccgcaggccctccagatcctccattctttgataaagttgagtaaatgacagagaggtagtttatcttaacagaatatggctggcatttctattgtaaagtaaaacaggttctgaagaaagaatggactaggacatggaggtgactattgaggacagagagggaatgctttggaagctgtgaaagctacacagagaaactctgtcttagaaaaaaaaaaaaaaaaggtgaacaatgagatgtggcaatgcactttaggaaatcctctaagacggttgggtgaggtgaggatgctactaccaacagtccctgtgttagtaacttgtctcatatgaccaaatacacaataattagataagaattgaaagggagaaaggaaggtttattggttcatggtttaagaatggattcgggctgttatatcacaggaaaggtgtgacagtagaagcataagaaggctggtcacgcagtgtctgaaggcaggaagcagggagcagaaaggaaatgggcctgagttacacatcctcaaggctctctcctggtgacccacttcctccagaaaggtgccatctcctgaaggttccacaagctcccaaacagtgacacctgctggggcccaagtgtccaatggttccatgtgcccgtggggggccatttcacattcaaaccgaatcactttcctgagggtccatactacatccttcttctctatagtacactcaatctttaactttctccactgggttccttcacctaaagttgcagctataatttatagcggcatgctgcatgccttagaaatacaggggtctgaattcttctgctttggaaagactatttgggggtcatcacggggcaaccctgtatagactgacaatatactagtttgggtccaaggaacaaagtgtttttttaagagcttgtcatattgagccttgtgctatgaattgctggccttggccacaaagagcttttacaaaacacccctgctttttgtattgttttaaaaatggtctcacatggcccaggctatcctttacctctgtatttgaaatgactatatgcacaaggcaaacatgaaatgatgttctttttcccctaggaggggaggcagtgtgtgggccttattgacatgctccagcatgcttccccagagccttggaagatttgctagggcctacatcatcattctccatatagatagttggagctaaaaggtgtaaaatactggacaaaatgtctcactagttcatctccactccacctttgagttcagttgttggaaacaacagtctggctgggaaaacaggtgtaatcagtttctgaagacctttccaagcctaggcaagagtttcttattcaagagagccacagagacttgcagtatcaatgattggtgctttgaaggtgcagattccacaggcttgcaggaccagaagggagtgtggtcatcagtaaccagaactggctcagctggggattcttacacacaccgagcctggggaattattaggcctcttttgttcaattggggtttttgagacagggtttgtactccgtagcccaagctagccttgaagttttggcaattcacctgcttcaacctttcaagtgctgggatcatggcatgagccaccacactcagttatagatttctgcctttttttttttttttttgtcatcacatttctctggagtagttcttgctcattgacttcacattcttaagacgttatattaacatcatttcctccattaatttttacatatatcctagcaagacgtaaagcgatgaactgtcccaaaatggaagggtttaggaaattttacaacactgaagctgttgggactgaggctggaaaaccacttaccagtaatactgggaagagaactcaagtatcatttgagggtccaaattttgaaacaatgtattacatttcctctatctctaggaacctacgataacattgtaacaaaatcagcttcactatgtcaagaaggacatattttaaaaatctccacactcagaattcttattggtagtttttaaaagcagcaagaatattagcctgtaaaataggaaggccacaagttgaagacagagcaatcaatggactttgggggttcttaagcttaaattttagctttgaaacctattagcaaaccatgaacacaagcagataaaaggcaaaagagagccggggtggtggcctgagcctgtaaatgctagtagtcaggaagaggtagaagcagggggatgatgtgtttgaggctagcctgggatacatagtgagacttcatcttcaacaatgacaaccactacccaaacagagcagacaaaagaaaagacttcagctatccacacccttccactcagggcccataggaaggaagaccggcctggctcaaataaaatgaaaggaagatcttgtaagtccctcatgaagtcagctgacacttcagactcacagggtgaataaatttgtaatctatttacatagatggagacaaccatgtgactgctgtcttacccatatgcggtacacattgtttggattgtgcacttgtcttgacagcgttgggcctcagaactgaccttggcactaagataactgaggaaaaaaaatactcaatatgataagaaatcacacacaacaggactcctgtgacatcacatttatggactgttgtcagtcgggcaggacattactgaaacagttttcaagtctgagaacccaaagcaaacggttaagctctgacacaagacacacctggacctcctttgcagcaggccaggtgaccttcactctcctgaaaaatgatgcacgggcttagagaagtgccagcatcataaaatggcacggcaccagtacttggcatgccttctcttcagaaagctacccttcaggggtgagctttgtttcactgctctcaaatccctgaatcagaaagagctggagtcttccctgtttgtgtaagtcctccccagagtcgcacactgggcaagcatttatttaattgaactacagtttatcacaatctttggctcatctacaggcacgagggcaaagaccatgtctgttttgttcactgatttttctcttgtacataaaggtggtggtacataaagggtgttctctcatccctggagagtggaggatgctgtgctctcccttgtcacatgggttctgctactctcaactaattaaaggtcttcaagaaaccatttcatttttttcatcaatgcattctatcatctgatatttactatatcactccagtgtgtcaggtactgatcaagtcttgaggtgaccactgtcatcagctagataaggctcccaatctcaaggtaagctcacttctggagccactggaaagtctctgtggtccatagcatcactaaagatgagatgaggactcagcagagactaggagccggaggacaacaagggggacagtgggcattgtaatctaagtgtgaaggcactcatttttgttctggaaggcagctgtcttaagagtggttgaccactgaatatcctcaaggcttaggttcaagaaagtgataatgactgcctggattcagaatgaatgaatggataacaaaagaagtaattggggttcaatcctgaggccccctcttatgagtaattgtatttagagtatcccatattttagtttcagagagtgggaagaataattttgtgaattagggaaagaatttaaattctgtgctgctccattaagaatcaagacaaggcatgtcttaaaaagagaatcagcagcagaaaaacaaaacaaaacaaaacaaaaaacaaaacaaaaaaccctgggagaggaaactgttgggggaggatcatgtttgggaactaactgaagatttacgacagtaatttttaaatcatagacatgaattagtctgaaccatgatggctgaattcactacacacaacatttgtaggatgatatgaacggttacatgatattaaattgagcctccatgttacaaaattgttggaaattaagctgtttgtaacttcctttggaggcaagagaaatatgtgtgcaaatgttaatcaggcccccgacctgtcttttggtgcagtttgatagccatatctgggataggagccaaactctcttttgggggagaactagcagtccccagagccacagtgatgaattacactggtctgagaacaagaaaggaagtcactagggctagaacaaagggctagtgcttcggagggggcttggctccctgtggctgcatgtggtatatgattctctggtttttataccattcctttctcagccctcagaattcttaatcctattttcactgccctaggtaaacctggaaatatttccttcttgactgcaggttactcacacaataaacaggtaataaacattttactgccccgagcaacctcctgctgggcaggcaggcaggagaaaggggctgcagagggtgaccccctacaggacaaacggcaggcgacaaaggaggctagtaaccctttaacagtgctcacctcagttgttccaggagagtgaccctgagctgctggtgcgcattagccggcccccagcgctctggagtcctccctgcttgaggctagtaaggaagatttgatttcaccaaaaggtaatttagttgccatttccaagctctgtctggctaaattaaggatgaggatgaaactgagtttacagtctcccagtttaaaccacgagcagggagcccggaaggcaggaagaacagggcacgcagggtgttcaggcatcagagaagtggttctgggcccaatggttctttttccagctcacaccttgcttgtgaacacaactttattttcttatgcttgttgcatatcatattgtgtaatccttatgatctttgacttgtgcaaaacacagtggatatctttcttcccccatttcccctcccccctcctttcttcgcttccttctcttgctttactgaacatcaaacccagggaattgtacatgtcaggcatgtgttctaccactgagttacatcccagaccaacatcctattttttgtaaacatttcattttacatttatttatttatttgggggatactgtagaggtcagaggacaactttcaggagccagttctctccttccaccttgaggattttgaggatgaatctcaggtcatcaagtttggtggcaaagcaccttgaccagctaagccacacatggctgtgcctaacatcctatttttcaatcaccctcaagtttccctcaaaagcttgttaccaggctggggagatggctcagaggataaggttcttgccctgcaagccggaggctcacaattcaaaacccccaaacccataaaaggacagatgcgttagcaggcatctgtactcttagttcacttatggtggaatggaaagcagagatagggaagaatctccagctagcctgccatctgcagcggtgaccaacaagaaagcctgtctcaaagcaagctggaagacaaggactgacacctgagattgtgctccagtcttcacatgtatgtactagcatgtatatctgcattctcaaaaatgactacacacgctattgcacgtgtgtgtacacacacacacacacacacacacacacacacacacacacacacacccctccccaaaagactgttaccttcagctcagtgaaagctttttgtgatttccaactgcctgggaaatatttcagttttctttcacattgaaggtataactcatgacggcgaggaaacattggaccttcccccattgtagggtagaaaaagcatagccaaatagaaccggaaaactccacccccaccaccgccattcaacttatttatgggaaattaaaaccttacttacataaatatttcccaccaaatagcatgccaagtctgaatatattagcccagggcaaatgataaatgcattggcatagataattttccaattcatgtaggatgaaaaaaatgattattttataaatcaacacttctgtgatgccagctgcagttaatttatgatatctggttctaatcttatttcagaatattaatttctactgtattttgttgcagagcagtaagtactggccagcaggtactgtgacacactgcccagtgtatcttttcttgagacctgattggccatttgtgacgtagctactgtctggacacaaggcttcacatactcccacacgccatctctgcttttgattttcttttaatatttttctggaggggttaagggagtgaaggcattctgaagaatgacagagccatagcctgcagcagggctcaggggacattttggacattttggccgagggtttctagtagattggggttttccctccattgtctctgtaggaagcctcctacagagaaaggatagaggtaacactcaaagtgaaagacttcaagccccaaacaaagagtgcagaatagtacagcatggatacacacagcaacaaggggaaagaggtcacagaagaattggaatcggccaggcagggtccacatgagaaggggagtgcacccgtggatgacttgaaaagagcgaaaggcaggatgcaacccttttactttactggcattagacttttattaggcatctgtcctgatcagctttatctgtcaacttgacacagcctagaatcatctgagagtagagtgacaacctaggaattgcctagatcagagtatgtatgtgtgcaattgtcttgactgctcattgagatagaaaggctcagctccatttctaactaggtggtccagaacatcctctattgtccctgcaccacttcttggttgtgaagtgagttccgcggtggatgtgattctgtgtaggatagcgagcaggcatgccttcacgttcctacctgcaagtccctgccttgagtgactcctctcagtgatggactatgatctggaattgtaggctgaaacaaaccctttctttccctgggtggctttggacagggtatttgtcacagcaacagaagtgaaacttgaacagtcagtctttgactgtggttccagagttacaaaactctcatagaactgggcatggtgtcatacacctttaatcccagtacttaggagacctctgtgagtcgaaggccagcctggtctacaaagtgtgtttcaggatagccaaagctatatagaagaccaggtattaaaaaaacataataataataataataataataataataataataatgaatgccacacagaaaatgacagaggacccatggctaatggcagtggctacagagataaaaaggttcttgaactaagacgaagggaaaaggttaaggatgatggggtggtgtttgaatgcaggaagggctttagaggggcaccccttaactctatggtatactgggcaggtggttctgacaaagagcaacagatttaagtaaaaaccaacaactttcagtcagattgaagcaagatctgtggaatggcagggttaaagccataggcagacagatagggatcctgacttagaatggccaacattaaacttttggctcttgtctgaccactcctgaaatacaagaccaaggctactttgttcactaggtaaaagatcctcagcactgttcctactcccttcccctttgctaagcacaccatccaggcctttggcagactttgtaaggaagaggtgtagatgcctgtgttcagtacccaccatcaccctgacaacccaaggcatcattctcatttgcttgaatccaacctggaggatcctgtgtcctcctcttcatgctgaggatagcagctctacactacccagggtctaccagtcacactgagaacaaaccctactctctactggccttttgggccaggtgtcttcaggcttcttagaggactcctcagtggggtcctcatcccatccttacccccctcccagccactctcttgggctacaaggctgctttgttctgtctttgtggcagctgctccttcagcttggaccctcttgcctggctcttcacttggctggctcctctcagcagccaaggctcagctcagatgtcacctctcaggtgctgagtgggaacctcatctaagatacaatgtggtccagcctcaaacaggtgcctttccttacacactgggtaacacaataaatatcagtccaatgaaagaataaatgggcttcaggggcaggttgtctctggctagattgagagagtggcaggtgagaaaataaagaaaccattgtgggggattggggcaataactcagctggtgaagtgcttgccatgcaaatgtaaggatctgagttcaattcctagcacccatataaaaagctgggtgtggtggtatatgcttgtcatcctagcactggggaggtgagcacagttagtttagcgggatgggcgatctccaggccctagtgagaaaccctgtcaaaagataaagtggatggcacctgaggattggtactggaggttgacctctggcctctacacacatggacacacatgtgcacctgcacacatacacacatacactctgcctgggactggatgatgtttggggtagagaaagagatttacaggcctatccacctttgaagtgagcttctcactgcctccatcatagtctcagaaagaagttgaaccaaggctcaggggacatgcagaaaatggagcagaaagactataagagccagaagctcagggagtttgctgtgagagagtgtcacctagtaatatcagaagcccaacccataagggcccaccaacacgactgcccaaacatgtgctgaagaaggatgacaccagtgaacttgccaaactccatggggaaaaactcatgaggcctcaaccctccacaaagaactgtagacaaccgagggaaagcatagaagagtagaggtggcctttccaagggaagagcaagccaatcatagtgccacatgctcatcctggaaacatacatacaggtagcattatacagacggaatgtgttatatttagaaatatgcatgtcaatatattcatgcagtaacagtttgtgaaaaagaggccatggatttgaagtagagagaggaggggcttatgggagggtttggaaggaggaaatggaagggagaaatgttgtatttagatgataaccctcccactcccaccctatccccccaaagaaagaaacttgtgggttggccaacagcatagtcacccaaggcattggctttgcaatctgacacattagaatcccagcttggttccatgttacctacatgcagattacctggcttcatgaaatcctgtttcctcatattagagaagaaatgatggtgctcgagagatggctcagtggttaagaacactggctgctcttgcagaggacccaggttcgattcccagcacctacatgtcagctcataaccatctataactccagttccaggggatctcagacagacatacattcaggcagaacaataatgtacataaaacaaacaaacacatctttttgttaaaagagaaaataacaaactgtatgttattttgtggatatagacaggtaacatgcaaagtacctgtttgcctaccagcttgtggtgatctgaaagaaatgttccccatgagtgtatgcattagaatacttgatccctagttggctgcacatttcggggacactttgctgaaggatgtacattattgggagtggtccttgagtatttaaagcctctatcccactcccagtttgttttctctgcttgatgcttgcagtaaaagacccagtatctcagcttcctcatcccgctgccatgcatgctgttggctgccatgcttctctgccacggtgaactttcatccctttcttctatggtgtttgatcacagaaacagaaaagtaactaatatacagccataatgcaagcaaaacaaaacaacaaaaactaccaagttgtacagtccatcaggataaactgagccttccattgtccttcataaaggatgctaagatgctccctcattcttcctgaagctgcagcatctctccctctctatccaccccggacatttatccctatggttctaggttcttagaagggtttgagctgtcctaattttacctggacagtgcctactttgatttgggatgggattataagattcccagacatttctcacgaagcagcttaccaaggtcccagccagttagccaaggcatttctagggagactggtgtcttctgttttacttttgcccctaatttctgtaaagagttgaagggcagcctttgagggttctataaatgttaatggttgactgacatacagatctcttggaatgtttttactagggctaggtggtatttgttggtctttggttgaaaaatgccaaagtgtaaccgctcagttgcttgatagaaattgaaaacaactctgtacattttgagattttatttttaaaaattaatttatgattcctgctcccaaaagcctagttagtggtcacaattttagttgttgtttctaaaaaagcaataaactattttcttttaaatccaggaatgcaggttaatatttattgcctgttgaaagaaataaatcaaagactctgtctgtaccctgagatttgctggcattacacgtgaccattggtgatactgacaggctggaacatggagaggttctttataagttagtaactggaggaggggtgatggtgaggagggtggggctttggtgatttcattcccagccacagctggcaaaattgcttattggaaaataaaagtcatggtaaattgagcttgacaataaccaggcttgactatgtagaccccttctccactcaaagcagttagagtgggggggggggaggcggggaggtggcagggaaaggaagcccctgtcacacatccatcttccttatcttgcagggcactagccatatgctgtttgtgtgagtgctgctctctgacggctcctgggctctgtacctttgcagcttctggacatggggtgaagtgtagtcattttacctttcctattcctcaagaggggacgaacaatcagagccatgctgtccaacacagtaaccatttaattttaaaaattcacaggctggagagatgtctcagtgtctcagagcatatactgccctgcagaggacctgcatccagttcccagcacccatacctagtgaccccaaatggtctgcatcccctgatccatgggagccaacacacctggcttcctcagataactacctccacctatacacataattaaaaatttctttttagtcttaaaaatgcagtcactccagccacttaccaagtgtccatagccacatggactaatggctactatactgggggctacatggccacaaatcaacccccactccccagaatgttctatcagacagctgcaattcagaaaacccaattggcaccaagaagcccttccttttttggccccaaaccctgaggtcacggtgacctctgtggtaaagatgttaactgaacctttgagaatgtggtgatcctctagtgtctcatgtcttcccaaacagtgggaaacaaatattgtgacttggggtgtggttcaaacatcctgattccatagacaaactctgaactttacatttccccatacgaatacggaacagcaacgggagacctgaggggtgctttattttttatgagctccctcccactgttacaagcagtttttttttttcttaacaaacctggtttttatcatctgtgtgactatgcaggtgtcatgtgctttgaggaccaagtatgacggagggtctggctcagaagacagtcagcaaagcaacgcagctgctttacccttgtcagggcactcagtctccccaactgtccttccagccaatgagctttaccaactgcaaatctcaagtgcatcaccctctggatattgcttgcaatatgtaccatgaattcctattttattttcacctttgagacaagatcttgctttgtagtccatgctgaccttgaacttgtgatcctcctgccgtagcatctaaagtgttgggattacaggtatagcacctccatacctggctcttaaattcttcatttatttacaaccctcaggatcattaatttaaaaaataaaattgtgaggaagagttgctaagaatcctcagaaacattctctgatgtgaagcaatataaacctgccttttcctatctggggcagcatttttgtgagggatagccccgttactgcaattttagggcaagcacagcaaagagagagcctttctgccttccaacagacataagacaggagggtcacacagtttgaaaggcaggggcatgctgttaaaatttggtaaacttcatactgtctaattttggtgagcctcaaaaatccctgtgctctgactggattgggtttacagcagaggctttcttcccatggtcccagagcacttttatgcatataatctgcattgcacacccaccctggctcctttttctccactggcctaatttgttctcctgcattaggcaggattaattcttgccctagtttgctaggtaggaaaacggacgaagccgtggaagactctggcttcacacagggcagtgaagtgtggctttactttcaggtcactgagcacaagccaagcttatttcacggctggaacacgtgacattctgcacttgtttcaacaccagctattccattcatggtgatactgcctctcaatgaaaactccataaaatctctgacactttcaagtcaagggaactgtcagaataaagagtgtaatgttgaggatgacaaaaaacacttcatgacatttttttttaaaaccaggcaagaacctgcctgtctcttgtcaggggttaataatatggttgccaaattggtacatgttatgagttgaatatggaatgtcccccacaggctcttgtgtttgaatcttagcctccagatgctggtgccatttcagggggacctggacctagctgatgatagatgtgggccaccagaaagcaggcgggcttaaggattgcagcttgacctggcttccaatcctcctctcattgctcattttccaggatgcgaacaaaccacagcacaagctcctgccatcacagaccacagcttcccggctgctgcatcttccctaccatgagactgtaagccagaatgaacttctcttcttttgggttgttcctggtaagtattccatcctagtgatggtaaaataatacagtccaacggaagccgaaaggggctgggtggatggaagggaaggtgccgtgcagaactgcatcgtagaacaagagcactggggaaattttttgagaagtggaagagaaagggaaaatgatgagacttgagaattaaggtcagatcactgctttgaaaccccaaactgtgagtgctgtggtttgggtgaatgttccctaatggtccattggttaaaagattggttcccaaggtgatgggacctttaggagttgggagatgttgggagttcttaggtcattgggggaacctgacaggctcatgaagtgagccgagccgtttgctctgccttgtgctctcagtgcgggtgatgtgctgccctttctggatagtcccaacatgggactatcaggcttacctgattgcctaccatgtgcaaggccctgggttcaaggtaccacacaaaatgagtagggaagaaagataaaaaggaaagaatgaggaagacggaagaagggaaggataaaaggaaagaaggcagctcgccagtcagcagatcttgacttagactggaatcctcagaactgaggcaaaataaaccctttttctttataagttggctgtgtcagatattttgtcatagtaatgtgaagctgactaatacaattagtcaggccagtttttaaggacattttatggaataatcccaccttttttttctttttcttttcttttctttttttttaaccaaccaggcatagtgacactttcagttctcatggtcacagggataggagacttaaatatagtaggacagccttctttggaggactctgttagaaagagcacacaggcacactaaatgtaggtggccttcctgctagttctttgggttgacttgtaatgaacggccaagctgggccagggagcagccgacaagaatcagttttccttggaactgaggagagacggtgagtctggcttctctgcaggcaggtggccctgcttcggagccctggctttgggccatcagggttctatatgcccccctcctccatcttagaggaagatttgactcctctaaggaaggaccttataatgttatttactgctattccctatgctccaaatttggctttgggcagcccattttcagtatttgggaaccgtaagacccaagcaaggcatgaaaccaacagttaatacaaaactttccccagggcttggcatttagctgcagccccagcaggcattttgaatttaaaaaaaaaaaaaaaaaaaaaaaaaaaaaaagagtccatgcaggctctccaagtacggggccttaaaggcaatgcaggtctgaaagcccctttgtgctgtggagctgtggaaagagacaatgaaacgctgcctggtattcctatgtaaatgccacctcgaggacagagttttcgccaggcagatggctcatttctgggctgtaacctcatttttccagtgttccctgttcttgtgaagttctgcccctggagtcaggtcctaattggtgtcaaacgctcagagacaaaagtgaagtgtacacatcattcatgggaaggctgtggaggctatggctacggcagtggctgtggtataaagcttgtggccagcaggacaggctggtgcaggcctgctcagaacttatttctggatgccaagctaacacggctctcgttgtcaacacttccattcgcctgactctagcatgcccccacctccccacgccttcccagagacagggtttctctgtgtagccctggctgtcctggaactcactctggagaccaggctggcctcgaattcagagatccgcctgcctttgcctcctgagtgctgggattaaaggcgtgcgccaccaccattgggcttctagtatgtcttcatgctgaggtcctctttaggttatccatatgttgacttcagtctggctcagaaaatcttgggtaggattaaatagagggtccatttatctcatcacagatttgggggcccgctcagaagccctgctgccacccagcagacaggtaatcccatagccaggactctgcagtcagcgaacggccgtctgattggatgcacattcatcttcaaattatgttgtgtgacagcctgggctgcagaacaccattttaacatgcagattgactcctcggaggctcttcattatgcatttagcggcctgttttcagactaaccagcatgtcagagaggccctatcctttttccacctgggtggaggaaatcacttgctgactgtgggggagctgtggatattaaaatgcatgtttatttttctgagtatccacatacaacacttttccccatgcaggaggagagaagaaaaggagcagacagctttgactctgaagcaaagaaaatggctatgccaacaagccagtctcggtggaagacaggggctgacaaggccaggccagcccagtgccttctggctaccctggctgcccgcaggccggcctgggtgtgtccacacaaatgctcttctaagacagcacagactctctttcctcgtacacacagcccaagtattttaagcaacacacttccaatttcctgtttctaaaattgtcccgcatctccaatggcattccatgcaatcctggcaagtaacaggcagaggggctgagccaagtccactccaaggacagtgagggtgccttgtctgttgaggggacagcacatcagggcgctgggtcactcacccctcttctcttcttggtgtgacttaatttcagtctgctgggtctgtgtctctatgacctctctatgacctccagctgttactgggcaagcacagccttattccgttgcccctgtgtgtgtgtgtgtgtgtgtgtgtgtgtgtgtgtgtgtgtgtgtgtatgacctgctgctactgagcaagaacagccatttcctgtgtgtttgtgtgtttgtgagtgcctgtgtgtgtatgtttgcatgtgtgtgtgtgtgtgtgtgtgtgtgtgtgtgtgtgtgtgtgtcacttggtatggtgtgtgtgtgtcctttcatgatgatctctttccctttcttaaaaaggaactgtatttgcattggctttaaggtttcactctcattccactaaggccctcactgtggcattttctccatttgtttgaaagactcctcacattctagacaaggactctactactggattatatccgcaggcagccttcacttcttgagaggcccctgttccttcagcccctgctgtggattatgctctctgttcagatagcaaacccctctgtcatccaatttgggaggctttcggatgtgtagtcaggcccagctgattcttttctttgttgccatgaaagaacagttcttcaggggcttggaaggttggcttgggcacacgaacttagaggccaggcttgacaccagccactgccagtgtccccagagggcaggcatgtgtgctgaacagcttctaggccttgcagggtagtgccgaatgctgctatcaacgatgcagccggggcttagctatttacattaaaatattacatagtattttcatagggctccaggcacaaaataaaatggaaggcagagctgtactccggattctgccggcagggctgtgagggggaatgaaatggttcagatgctcggtctgggactgcagtattcctgatgagcgaacaatggtgcagaaactgcggccttttatttgcacatggaatgcggtgatccccaccggcaggaacaggttgcatgtggttgtgaggctgttgctggctggtgtcacactgtggagtattatctgaaaaggtctcaaccagcaagaacaatatggcaacccggtgccagaggcaatgcttagtgatctgtcccttcattcacgcgtctcgctggccatttatttatttatttctgtgactagacacaaggtaattcttaattttaagatgctactgaaggatttgtcctcgaactactgtttttgggaaaatccttgaaggggaactaaagggactaggggagaggggaggcctgagaagtgggacaggagggggaaataggctcaaagtgtattatatatgtatatgaaaatggcctcttgcacaatagtcaaatgatttagggacacacacacacacacacacacacacacagagagagagagagagagagagagagagagaggttgagtaggaagtaagtagggaacaacttgcagtttgcaagcttcttataggcacagaaaggggattgaatttcagtgacaacccctttaggttcctaacacagggaccatgatggtacagtaggggtgctgttttgaactcccatcatccacgaaatcccccagtacctcagaaggtgactgtttagtgactgaggctaaaggaagtaatgagtacccgcccatatccaatgtgactggtgttcatatctgaggaggggatttgaaaacagaagtgggggggaaattgcactaggacacaggtaaaggtgaccatctctacacccaagaggcctcagaagaaagtgagcctgtcaacatcgtgatcttaggtttcctgcctctcaaactccaagaaaacaaggtccacccacacttcagtacttggttaactccacaaaagcaggtaagtagaagtgtggatgagggggccagtcagagcattttagggatttccagcatcattttctctactagatcttcaagaagtggctcataaactgcaagccagatgctaatttcacagggatcaggtggaaattgggttgttctgtcttggaaatatctccacagaagcggatttgctctttagcttcttgtgcatacggcagaactgacattttgaactgagaaaatgccacgaaggacctatctggcctctcaaataaatctctagatttttctttgaaccaatcaattggctctctgaggtgtcagccagtaacagacacatccgtcgataccacagggcagtcagggctggctatgcttacactgggcagtgtggccgagcggatcctcagatgtagagcacaagagaagactgtgtgtttcaggaggtgagggtaaagtggggtgaaggaccaggtgatgcttcactctccagcagaggaagacagcgtaatgtatggactgtggggggtgcatgggtccagcctttttaagactccctgctcccttctacctgagacatccatgacagtgcaggacacaaactgtgtctgaaggttcacttctaccacctagttctacaggtgataatgactcatgagagtacagttggaggcaaaaataaatattccaatctatcagaactgcaatctaatacagtggcacaggcctctccacttagcctcaggatagaagcagaaggattgctgtgagtttaaaactaatctgggctacatagcaaacatcaacctagcctggaccacaatgcaacatcctgtcttaaaaaatcctgaacaaaactctccaaaagctcccctcccaccaagaactaacgagatccccaaagaaacaaatacacgcctcctcctcaggtttgacccctgaacttgttggttctttgctctgcccagcagtgagcagccctgggctgtactactcacatccaaagcttggctggacctagcatcccacagagaactccattatcctttacttactggctctcagctgagcagacacaaatgtttatgtaatcctgtgccccttaacaaatatatattcctacccagagcagggaaatctccagtcaaggaatcctgggaaagagtacatctgggtgttattgctgcattcactacatgctgtgtttcctcaccaaggacagtagaaccaaggggaaatagccttccaagtccctcgcctgtcgtcctctgaatgacacgtccgcttccttcttccaagctacagtttccaaatcagtacacttctataaaccccaaaccttacttcttttctaaatgattttcaactcccctttctgggatttaatttctctgtggataacctagactggacacagaatagccctaacgttttatccgttatcttaagttttcaatatgatttccttttcttttaagcccccagcataccattggctttttaaattgctgctgcatattagacaggtatcccccaagttatcaaccatgactctaaacttactttactacgagttcagagctgatgagagattatgagtagtttacatgatttctcccaaagtgcactgttttgcacttaaccaaattaaatttcatctgccttcacgctcctcagtcccctggtttgttcagctttgcccaaagtatctcatagtaatccttaattgttttattaactgtgcctgttcgtgctcagctctccacttgggtgccttggcctgagactctcctcatactccgggaactttaaaagggatgtcatgaagctggcagaatctgtgtgacatgtaaatgattcccccaaacttatagggagactcctgaggacaaactctggagtcacttttggccccaagaagcctcatcctggctgagcaaaaagaatacaaacatgtttccccatgttttaggatgtcatgtggcaaacttggggaggaatctcagaaggctgctgagctgcctacagatcacctttgcctctggcttccttttgtgactatgagtggcagcagcctggaccactggagaccctgaactccattcatccttcccttctcttcctgaggcataacaaaaatatcttctttgtgtgtatctgaatcgtgtgtgtgtgtgtgtgtgtgtgtgtgtgtgtgtgtgtgtgtgtgcaagtgcaagaggcttatactatagcttgcatgtggaggtcagaggacaacttctcttgcccatagagatggtcccaaactcatgatttggcttgtgtgatgtaatgtcactttgggtgagtttttaaagacatttccacagaggaagagtgactgctccctgttcttagaacagataacctgcctggaactcacatgcacttatagcaagaccataagccattctagatcatgagcaaggagagcagagatgggtagaaccaaagatttatttgcttattatgtatacagtgtcctgtctgcatgtatggctgcatgtcagaagagggcaccagataccattctagatggttgtgagccaccatgtggttgatgggaattgaactcagccagtgctcttaatctctgagtcatctctccaggccctgaaacttgcattcttgatggctgtagctacttcaatagccctgaacccctcacttctgaacatccctatgagaggcaagaacaaactcacctgttaaagacactattctgggagtcagggctgggaggaaaatgaggttgaagattatgcttgggtttctttcatgtagccaaagcctttttaatgacacacagtatcattagaggtcaacaaattaattcttattcacttattgaatgactgcatataaaacatcatagactgagaaaagggagagaaaaatgtttctgttattcccttaagcaagatttgatcacacagtgagcagtaatacaggtgtgtgtgtgtgtgtgtgtgtgtgtgtgtgtgtgtgtgtgtgtgttaaatatcctaagagaggaagagtcctgcaatgaaatgggggatatggtatcaaaatcagggccatgggaagggcctaggccccaaatgtgcagcaagtagaaagcttggataggagtaggcagggtgcagaatgtccatgaagaagtctttcatcatagcctgaaagcttgtggtggcagcaaagctttctgtccaaaaaacatataatcagcttttttgttttgttttgttttgtttcgtttttttgtttggagaaggggttggggtttaattaccagcacccacatcaggcagctcacaaccatctgtagcaatagctccagtggatataacactctctttgctctctttggcctccaagggcactgtactcatgtgcacaaactcagacacacacacacacacacacacacacacacacacacacacacctagctaaaacactttacaaagtaattaccaaattaacacaaactaaatggactaatctatattagcttagtctggaaggcaatttgataggcattttctctttaaatattttgaaactctcaattatgaaggttgttttatggagatttcagaagtgttacaaccatagaaccttacccctacataaatctttaaagtttatgaagttatcatctcatactggaattaagcaggacactcaccattcaaagagattatctcattgtcttatcaagttatacataaacctgctctgaaacagtataaaagaagctttgcagagggtcagtggtagagcgtttgtctagcacgttgaggttctgggttcagcacatagcaccttaacgaacagggtttcattacaagacagaattccttccactacatacagtttttactttacacttttccattttagcaagtaatcaagtctaggctcctatatacactaggcaagtgtgctatcttttggctacatacatcctcagctctttaaactcttaaattttaaaatggtggtgaagggagctttgttcataacacagattaatgccctcctgggaattaaccatttagttctttggttacaaaacacattattctaaagccaatattattccagaagtctgggtagcactttagcctgttttattccagccgtatgttctccattgcttccttaatgatgtaagctactgtttagtaaccagcttcctggcattattgtagtatacaaaggtgttcccttctaggaccgcatctagacagatgggtcccaccatgaggctctctgttcataggcatgcatacactggagtccctgtttaaggcagactcaaagtatttgggcagattcatgttctaggtgagagggaacattaattcagacaatgtgatgtaagtttctgttgctgtgagtgaatcaactcaatccaaccaacatttcttgagcccttgctatgtcttagctgggctccaactgtgcaactgtgttggtgtagatatggacaaggcagatggaaacctgtcatacacaaagaaatgaagcttagatggacactgtattaaacccaagaaagacaagagaggccatatactccagttcttcctagaccaaagaattaatgatatcctttacagataatatattaaaaagactacatcggagtttggtttacctgtcacccagcactcaggaagccaagggaggaggattgttgagttcaatgaaagcctgggctacatagcaagattctctctgaagaaacaaaacagtatagatatctttggagactaaagatgatatctggacaccaatcaggtttcaaatctttgaactagaactttgatattaatttatgttcctcataaattaaaatggtatgagttagaaacagtctaccataataccctttcacagaggttaagagaattaactgagatgacacagctagtctgttctggtccgtgttatacagcatactttacatacttgctacttgtagattcctggaaaagaccaacaccctgtttgcagtagagatctaaacagacggatatgatgtggctgggggagtttccctacaggggacatttacagatgccagtcagtctgcatccatctccctaagggctccccagcttcctcatcatcagcactgactatgaaactgccaaatgtgtgcagctcacctctggccatctgaacattagtactaagctttgaattcaaacagacaaggagataaaaatggcaggaaatgactcattttggtggttggcatcttgatagtctcagtaacatctcatattaagtctagaaggacctttattcttctgttttttccaggcatggcccctggggttctggaaactggctaacaattttcaagtccttgtgtcctgatcacctgagccacacacacacacacacacacacacacacacacacaatttctactgccctcaaagcacccaaagaatatactgagtccatacacagagctctgtttgcagatgaccaggtataactccttctaaaattttgtttgattagtgaacttctttgtgttgtatggtttgtgtgtgtaagtgcacagctatgaagaggtgagaagacagcttgggtattgtacctcactggcctggaacttgctaagtaggctaggatgagtggctagtgaaccctgtggatccagctatcgctgactccccagagctgggattacaagtatgtgctactatgcataattaaaaaaataaataaaacaaaactgggtcctgggaattgaccccaaatctgtaagtttcaaactaaatattttatcaatctagctatctcccagccctagaatacctaattactacaggctgatgctcaaatactacacctgtgtcatctactggagattttgagaatatcattgtggtttttaatactgagggtgtgttactttgatgataaacacaaaaagaaaaaacaccttggctagccccttttagcaaaggctggaactccttgtcaggacatggtgtttaaagagcaagtatttgtagaagatcaatactcttggtcaagactccctggctcctctatgacctgaggtaacctataactcattatccaagaaagattacataaaactcccttcattttaaagtgattgatcttctttgaaaaaaatcacaatattcctattcagtgctctgattactccagtaagattaagcagcacactgtctgtctaggaaagctggataacagacgaggtcagcagacacttttggccaaagaatgcccctcggccattgctctgttttcctgatttgaagctaatgaggctcacaaagtggtgaggagggtggagagacagccactgagcccacagggtaggtggtctgtcaggagctcaactcaccttcccaagacagctggtggattactaggcaactttccagtcttgcctgcatgtttacctgcaaagccctgcttacacatgctgctgtttccagtttcttccatctgtgccacagcaggtccttcactctccaacatgaactgctgggacctactgaggtgccttcaaaacaagccaggtctgagttctctccccgttaccaaaatgacttcctgagggaaacgtcagctttgtgactaaaatgtagcttctgaggacaaatctttaccctgggctggaagagcccatctgaatttgagtctatctaatggcactgccaataatccctgctcctctatggagctgaccaagaccatactgctcatagactggggtcaggtgtcaaggggttatctgccccaaaggcatccttctggaagagaggtgggcaatgacacctagaaacttccaaatagctaaagtctttgagagagaggaaaaacactcttctgccttagcaatatagttctctctatttagaaagtggctgaaaatcaacacactgcttcttgcccagggctctgaaagggtggccacactgttaggggaaaaggcacagttaaagtgatgcaagatatgcatggcacctgtcaagtatgtcaataatacattctgaactctagggaagcctgagaaactgtctaagttgaagtattcattagtaatactaataaaaaaaaaccctgcctaacgataaccctgcacaatgtaggatgtcacagacattttgccaaagagaaagtcaagcaagcaaattttgaagccccttaaaatgcagacttctgcccacttttaaacaaacaaccccaaagtgtaagggggttggctagatttgaatccagttgggtgggtcatgctttatgtgctgtgtgtattgtacataaaacatttgtgaatacattttagtgagtgttaggggcgaaattagaacatcttaacactctgaggcaatttcccgttaaattgtcatcatctattttgttataggagtttctggggaatgtttaaagcaccatcattcctgcattctcttttataagaaacagaagaagtggagagatctttagaaggctccattttctggtaaggaaaggactccatttttcagaaaacagccagaattcctcggtaacagcctgacaaacctctgcctcagagttgaaggattcaggcaggaaaggaacatccacagtcatgactgatctttcctgaggacacttcaggctgttcccactgacaacctgcaggactggtgttgttagtatataaaacatttctggaagattctaaagtactctagaagagctatccaggtgtgttcctcttccggtacatccatacagatatgctcacgggtaaagacagaagcctgtcacagagtgacacccatctcagacaaatacccccctcaaacacccaggcttttactcaccactgggatgtctaccttcagtgactatatgtcacaacccacagacatctgggtggggaaggagggtcctagtgggtggagacctctgaggctggaaaactcatttctcttggcagataatttgaggtgagattttagagaacatggacacgggggcagggcttacttttttcttgtagagtgcctgctctgtaagtttttttttgggggggggggtaaacaaaggacaacctggtgtttcctgctgaagctgattcgttctgcgttataatccttggcttactgacatgatggcgttatgggggctttaggaaccgcttctatccactagggctttagagagggaaaaactttgaaaaaaaagaagatattttacgcttcacatgtctgacaagggtgtgtggggccaatttacagcaggggcttaatatatttttgatgaaaattgctgcaatgtggcacacagattaaagagaaaacagctcttttgtaatgacagcagtgggctctgaaatgaagcccagctggtacaaagatcctacatggatttcaagagatgtaccctcttcccaggcttcacccagcatggaagagtcctccaggctgcaggccttattgattttctgtgggagcgactcccaggattccactttctaaagaatcagtccgtcatggaaaactctaatgacacaaatgtgttgaaaagccagccaagcaatctggacaggtcacagtgaggatcatcaaacccaaacctctatcagacacctaatgtcatatacagggatccacccagcagcagtgacagtggtatctctctatagaggcaatataaggtgtttacagtttgtatgctttgaaatgattacattattacaaaagaaagtattttctccaggactgggaatatagctcagttgctagagtgctttcctagaatgtacaaagccctgggttccaaccatgcaaacctggagtgttagcacatgactgtagttctacaactctagagttgggggcagaaacaagttcaaagttttccttatttacacagggagcttgaggtcagcatgagatagaagccctgtctgaaaaaccaaagccaagacacaaaaacaaacaagcaaacaaaaggatattcactggacctttgggtatggcacagaaagaccaaagaataaatggtggctccatctaaggctcagaaataaggttttccagagctcattttatatataactccaggagccttctgagaatggactctctctctctctctctctctctctctctctctctctctctctctctctctctcactctctctctctctctctctctctctctctggcactctgagccttgtgcatgttaggcaatacactctactaataggaagatgatcatcttaataacattaggtcatttaatttccataaatccaattttctcatctgtaaaatgggttgacacctcataggatcaccagggtacctcacagtgataacatcaaagcactcagctacctaaggtggctggttctgtttgagcttatttgtggagatggcagccttcaattgggtgttacagttcaaaatacgtatgttgtgtgaaacctcagttgtagagtttatatcaaagttagcatcattttacatttatttatttgatgcaaggggtcactaagtagtcttgtctagccatgaaatcacagagatctgcctgcctctgcctcccatgagctgggattaaaagcatgtgccacctctcctggtagttttcattattgtaaaggaataaaagccacggtaagatacatttatatctatgtggtgacatttaactaactagagtccagtcaggttgaagtctgggctctcagagtattagacatgtgtcagcaggttcatgctactgtgtgtgacactgagctgggtatctggaaagccaggtgacaggccctggtgaggatcacttgacagctaataacgtcacagggcactgcgcgtatcaattcaggccataacacaaggcaactgacaagttccttcaacaggctgggagcacataatacaacaggaaggagtgcatttccccctgtgacttaaaggagatataattgtgatgctgcatccttgatgggaagccctgtcttttcacagtaagactctgagcagagagcatcatgggttgggctgtgaacacaaagaggtggagggatccagcagagggcattgtactgtttgagaacacactctgtagagaagggtgagcgtgatggctggaacttgccacctacataccttaacatgaggaaaggaagaacacatgacttatatgttccctcaatccttgaccttaccaaagacacttcaaagatgtaacacttaaatgtaacaggtggaatttacagattgcctccctaaaactaaccatacccaacattttgagatgatctaactatagacaagacacttcctacaaattttaatagccgtgataaagattctgatacttagaattactagatatacataatatgaaggtggtgaagctacctgaagcccaaagtctgcttgaaaacacccagatgctgacacacaaaggaggcagagactgattacagaagtgtggcactatctctgtaactgaatttccatgtcatgcttaggggggctcaaaaagaaaatccatttattttgagcactggtcccaaatatttatttaaaatgttaagccatatggaattgctatctttgtaagaaaaacatgagttaatgctgactattttaaaatgctgaactaggagctggggttgtagttcattggtagagcacttctccagcatgtatgaaatctgtgggttcaattccccaacaccataaaaacacaacagaccaaccaacaaacaaacaagaccctaaaccctcgtaaccctcgtgtgtgtgtgtgtgtgtgtgtgtgtgtgtgagagagagagagagagagagagagagagagagagagacagacagagagagagagagagagagagagagagagagatgtgttcacgtctatgagtgtgcatatatgcttttgtgcatgtggtggtcagcaaccttgggtcctcaggtattgtcaactttataattctgatcctttactcggctcatttataattttcacccataaattctgttaaactcaaatatctaagaagtttacttttcttatctgggcagattaaaagcagatacatctctgggtctctaagtaattagtttaagcagttaatccaatttagacttaagcatgagttctagagattctttccatagctttcttctgttctgtggctagcaggagtattgcaacactcgccagccctactgttggttccaggcccctgagagccaaccttgaagaatgtagtcaaaagcatgacctggcttgtattccttgaacagaattttgtgtgtgaaagggatcaccagctctccaagtgattcaagaacataagaaaatttatcccaacactatggacccgattcatgctacaagtggcctgatgatcaaagtgaccattctgctttcgaagctgaagtaactgaactctgaaagtaactagagaaatgtccatcaagtgtgcactgtgtgtgcatgaagggaaaagagtgtttgagaaggaaacccccaagtccaaagaagggaagtagcaacactctgttctgtcttcattagatacaacattatcaggttcctgttaggaaaactgaaaagcaacattgtggaccaggctgggtggtggtggcacatgcctttgatcccaggcgttgggaggcagaggtaggcagatctctgtgagttcgaggccagcctggtctacagagcaagttccagggcagttagggctacacagtgaaagtgtgtctctaaaaaccaaaaagaaaaaaaaaagaaagaaagaaagaaaaagaaaatgtgaaccagactgagcatgaggcaggagccagcaagcgagggaaggccaaaaggaactggacggcatctttactcgacactttctgtagaaagcaatgactaacaggcagtcagagtcaatcacttccctcctacgtccatcgaggaggacaagggcagctacagctgattctgattgtggtcctctatgaccctttttccccagggaggccccagggcagcctgtgactcaacatttaaacagaagcaaacatgtttccattttgacctcagggaaaggggaggaaaagggaaccacgaaaccaaatatctacgtcaggaagaaaagtgcaaatctctacatgaaacaaaatggtactgccaaggattgtacttattctatcattcaacaacaacactatcaaattcatgatgcaaacttttttcattttagtaaacagcagaatccagttatttttctttcagatcctcacagtcaacactcctttttttttttttttttatgttacacatgtctccaagagtggaacaggagcctgtttggtctcagcaatcacgaattgtattctaaagactttgttttcccttatgtaaagcctgtgtatggatgatcacagatgctgttgtgcttagtatgactaagggagggagggagggagggagagagggagggaggaagggagagagggagagagggagggcaagatcgagccattccttttcaggagtcgctcagaacttaatcatgcaggagtattatggtttggatcctaaacaccacaaaggcaaacgtgctaacaactctgtagccagcctgtggtaacaactcagttactagcctgtgctaacaactgggttgtcagcttgtggtattactgggaggaggtaatggaaccttaagaggtgggcccagtgggaagaaggtaaggagttggaggcatgccctcgaagggctcaaactctatcccctcctttctctctctctctctctctctctctctctctctctctttctttttgcttctggattgtcataacactagcagatgtcttgtattctgcactccccacctgatgtgtggctttgccacagacccaaagtgactgggccaagcaaccaagggccaaaactctgaaatcatgatccaaaataacccttccctagctgtaagctgtttatgataggtatcttgtcacactcatgaaaaagccaactagcgcagaaagaaggttctcatccctggaagactatgtgcaggcagcaaaacagagtcagaaatgccccttgttcacttgtaattgaaagcccaacccatctttaattttttaaaagaatgggagttaatgactccaacatggaagactagttttataaatagtcacttgcccagaatgagtcataatcttggagcgctgagttgtaaacagcagtcatctcacttgttttgcaagcagtcaccctggtgagtccaggcaagctggcagattatctccatggccgaaatatttttggtccctatttgcaaagttggaggaaaatcccagcagaaagacatcaagatgcttgtaacgagatgtatccggtgggtcaggtactcgggggaccaggtctagtaccagtgggctgcagatgtctggttccactaacaaagacaagccagttgtggtgggaaagaccaccctcacttagcacagggttgcatcatctcaagactcttcctcaagcaatgctgagttgacaaacatggctgctaaggcacaccactaagtgacatggaggattctcagttaaacttgaccttcaaaacaatttatactctacacttacacacataccaagaaatgatttgtcattcatttacctgaggttcgaattcaattagacaacatttttttgggggtggtggtgtttctgaatatgcagcttgattcattcccaagacaaggctgtgagaaacgacgagaaacaaaggcagaaggagggggagagcagagcaaaaaacacaggctcagaaacaatggacttttgcccttttagtggtttgaacaaggatggtctccataggtttatatatttgaatatctggtgccaagttggtggaacttttggggaagaagtcggaggtgtggctttgttagaggaagtatgttcatgggagcaggctttgaggtttcaaaagcccacaccattcccagttagctcacttccttgtggctgtgtctcaagatgtgaactctcagctactgtctagcaccatgccttcacacctgttgccatgcctccaccatgatagctgtggactccaaccctctggaaccataaaccttaaataaactcctttttctacaagttgccttggtcatggtgtttaatcacagcaatagacaagtaactaagatacaacccagtgaaaagtcttgacatatgtctcagtgaaaatggtagatgtgggaacagatttcagacttagattagcatccaagagagacccaaactgaagggagcagaaacaaggggtgtgtgtgtccacataggctcacctgtctggtcatgtctgaaatttcaggtgttccctataagggaagtgggcagcgttcaatgggagcagacagaaaaggcgcacattccaggaaatagctgtttctataccagctctcaggcaagatgccacaggtctcaggtctccatacatgggctcctcagatacccaggagactgaggcaagaacagtggacacttaagacttttccctttagagtgggtctaggtatgtgtggcagtttcaatgcatttggccccgataatcttacagggagtggcactattaggaggtgaggttttgttggagtatggccttactggaggaattgtgtcactatgaaggccacttttgaggtttcctatgctcaggatacctcccagtgtttcagtccacttcacgttgcctgcaagccaagatgtagccagccccacatctgcccacatgccaccatgctccctgccttgatgataatggactgaacctctgaaactataagccaccatccccaattaaatgttttccttacaagaattgccatggccatggtatctcttcacagcaataaaaaccctaactaagacagcatgtggcatagagaattgtggtctggttaattctgaacatcaaggatgctctttgtctatagagtacctgagtcctgggctcagattaacatcaccttagatgctcccaaatcccccaggtgcgtggtagaacttcaactcctcagcatcactgggtccagctgtggcaaagatacataggtggagtacaagagggactgctggagacaccttgtaactggagatttttgacatggagtatgttgctttttaaaatggctacaacttcaaaatatccactttctcatatgcatgtcctgctacggctgggtaagtgtctgccactgcggtccctctccatctatttctctgcctatctttactgcacagagttacatttggcccgtttgcctgtgtataactcctcttctatttttctttatcctaattattagaataatacaactttaagatgaaaggacaaataccaaaaatcaaacttagtgcaactgtttgttgcaggggcaaggtttcttcagttccatctccccggggtggtgcactcttggagacaaggctgtctagatgcttcagagagatagatggatggacagacggatggatggatggatggatggatggatggatggatggatctggggcttgtcctcacagtactaatgtttaagcatccaccttaaactgctcaaggctggagatggctcagtggttaagggcctttgttactcttacagaggacctggatttggtccccagaatccacatggtagctcacgaccattgataactccatttccaggggatccaattccttcttttgacctcctcggataccaggcatgcaaagactgcagacagacatttgggcaaaagactcaatatataaaacaaataaatcttaaaggactaaaaactaaggacaatcattccttcataataggactgctgggaggactggatgaaatgtatatttatacattgctagtgttataccagtgcttgagaaattgaacagcacttccaaaaattagttattagtgtgtatgcgtgtgcatgaatgagtgtgtgtatatgtgtgggtctgtatgtgtgtgagtgtgtgtgtgtgtgtgagagagggagagagagtgggtgtgtgtatgtgtgtgtgtgtgagagtgtgtgtgtgtgaaagagagtgtgtgtgtgagagtgtgtgtgtgtgtgtgtgtgagagagagagagagaagagggaagagaataactgtggagtaggttctctcctttcaccttcatatgtcttctggggattacagtccaggacactagatgtgtatagcaaacccctttacaccctgaaccatttaacttctttctggcccttgagcagcaattttcaaatgcaaaatatcatgacctacatgacaaaaatgtcttacaacttacttttttatgtaacaaatagtgttagacacatggatgtcagggtgttgagaaatggtagaacttgtcgttgtaaatgttcttatctgaagtttgtgttctcagttgcttcctgatagatgctaatgaactccacactgttttctttctgtattttggctgacacatatgtatgtatgtatatatgtatatatgtaacttatggggtaccctatgatgtttccatgcctgtaaacactggaccaattttaagtgccatgtttctggatataattaagtacttatcttgcaagcatgaggagttgagttcaatcctccagaacacaggtttaaacaacaacaacaaaaaagacagggtgtggtgactagggtttgtgataccaatgctggggagacaaataaagtttttttttttattttctggccagccaacttagcttaatgggcaaattctaagccagggagagaccctgtctcaaaaaacaaggtacctgaggagcaacagccgaggtgtcctcagagggtaccctctggcttttaaatatactcgtgcataagcgctcgtacatgtgcacctttgttcacacagacacatagcacacaatataagaagacaaacaaaaagatgtaagccatagtttgcagtggccctttatagactgatgaccaagttgcaggggggtggatttcataaagaaaaaaaaaaacagttctcctgttttgaatttggaagagttaatgtgcccaggcatagtgccacaaggaagactttgtcagcacatgttggggagatataggacttaatgactgtgcttgctatcaaaacagtggagagggctaattagcgcagggaggctggctctggtggagggtgcgacactggtgaacacggggtggcagctgaaaattactaatgctgccgcctgactccactctgttttccttacctccatcctcccagagttcggatgaaaacagccagtaccacccagcgtgtcacagtctagaaagcagccaggtttgtatgcatgtccaccatcccattacaagccagctggaaccccacgaggcagatcttattgctgcaaatggtctttatagaagaggaacaatgtgccaggtgggaggggggatgtacacaagtggtgagcccagagccaaatctactgtagggacttgtctccacacacccacgttggggtctccactcccagccagtgcgatgcagactccccaggatgccagcctctggtgcagccttcacagggagaacacaggaaggtgttacagagaagttggggtgaggaaacccagctttctgccatggagttccactgaagagtctggcaaatggtcctcaacagcttgggccttgtttgctcacttgatgattaagaagggttgagttgctcagtcttagggcatttggtaactgaaatgctacagtttgcatctcgaatcttttccaaaggcccaatagttgagaccctggctttgtgttactggtaggtggtgggaactttaggcatctaatgagagatatgaggtaattaagggacaatgtccagaaaggcactgtggagtccgggtctcttctctccccttccacttcctagccaagaaacgtgggatttttcttagaaaaaaagcaaaaaatattttatttttatgtacgtatgtatgtgcacatgtgtgtggtcatgggttgtacctgtggaagccggaagagagcaacagactctctgaagctcacaacaggtagctgtgagctgtgtgacgtgggtaccgggagccaaactccagttctctgggttctctgcaagggcagcaactgctcctcacccctgcgccatctttccagctcccacacaaatgactttctccactctttccactgtgatgtatctcccaaggaaccaagcattagagttaacttaccagggacagaaacctctgaaaccctgagccaaagtgaaacttttctctttataaagttgattgtcccagttatttcctttttcttcctttttttttgtttttgtttttgttttttttgagacagggtttctctgtggctttggaggctgtcctgagactagctcttgtggaccaggctggtctcgaactcacagagatccgcctgcctctgcctcccgattgctgggattgaaggcgtgcaccaccaccacctggcaggtatttcttataccgatagaaatctgactgacagctgggtgttggtggtgcatgcttttaatcccagcactcgggaggcagagacaggcgtatctctgtgagttcgaggccagtgtggtctccagagggagtgccaggataggctccaaagctacacagagaaaccctgactcgaaaaaccaaaggaaaaaaaaaagaaatctgactgacatacaagagagatttttctgctcagacaaatgcacatatataaactataaagccacgggaaccttactaacaataccaggggatttgtggatcctagagagaagagatggtttggattaggcgatttttgaagtctgtttccagtctaaatttctgcaagccaccctttgccacctttctgggaacccccttccttcttgttaagccacatgtagcccaggctggccctgaatttggtctcctgagtagcagggaatacagacgcatgctactgtgcctggttagacattttccccacaaccatgttaatctagatctgcttacactttcatatgtaggtgcagatttaaggggagcaagaaggctttcacccttttaaaaagcatatgtgtgtgtgtgtgtgtgtgtgtgtgtgtgtgtgtgtgtgtgtgtgtgtgtgtgtgtgtgtgtgtgtgtgtgtgtatgtttcaggaagtcaaaagaaaagattcactgggctaagcctggggagctgacttgtgagtgaggcgtgacttcagaagcagagaacaatgcagccgaaacattgccacttttgcaatgacaaataacaatttgattataaatgaatttgttataggttaaaagttcatttatttccatttactcactaagtgggatatgactaaggaaagtcactatcagaacagcgcttgggcatttcttgtctgaagaataataccttaaaatgagttaatttaatccaattagttttcaaatgaaattatttaattactaatgacttctgccttgtcaggttctgttgggttttcacagtctaaccccaatttagctaatcaggaccctctttttaaaatgccactttgcaatgatttcagaaacagaaataattaaatacttgctttatccaagaataaccttagtaagaaatgaagaggaattatatgaagaaaaggaaagagtcataaaaagatgagcagatggagatagagttcatttctgagtggggtgacatttgctacactaaagatgtcatttaccccaaattattctgtatatttattgtaacttaaaccaaaatcccagatttttttttttttagacaagatccctctacatagtcttgactgtcctaaaactcactatgtagacctggtttgcttcagattcacctttgcctgcctctctcttctgcgttctgggatcccaaagggatttaatacattttttagagttattttagaaatatcaactggaggaagagctaagggagccaaagaggagtgatgtgagagactgaaacctgcctgtaagcagtaagaatggagagagagagagagagagagagagagagagagagagagagagagagagaggtgacggcacagaaattgtcttcagagctattatctgctaggaaatatgaggagaggaggggttactagcaatgcaagttccgtgcctcataattcgatcactatccatgtttctgtatgtgttcacatgtacatatgtccaaggatgtagaagtcagagggcaacttttgggagtcagctctgtagttccatcatgtgagtgctggggctaaactcaggtcgtcttgctcaacagcaagctcctctacccactgagcacacctacagacatttttacaaatcatataattactgtaaaaaaaaaatgagcttccctaagcatttagaaagtgaatatttaaaaagtttggtagagaggaagtctttataagcattaaatattttgaaattaaaaatgaagaagatgatgactaaaaaacttaaaattaaggaactgattaaatactaaaatcttggcaaagcatgtacatttctggtgcatagggctttaagtatctattgtaaacaccaggcaatagttatgacaagaaaacagtttattaatgaacaattaggcattgaccatagtgcttttggggttttgttttgttttgagacacagttgtactatataaaccagggtgaacttgaactcacaatgctcttgcctctgcttcctgagttcagggattataaccatgtgctacaaggctccactcactcaaaattcttaatggttgcctagtctttctaataatggtacaaataagaattaaaatttcaaaaggtggtatgagtgtgtagctcacagggagtacttaactagtatgtggaaggctttgggtttagtccccaccttcgcaaaactaactatctaaacaaacaaacaaacaaacaaacaaataagtaatatttgtgttatattccaatttaaaaagaaatcatagctcttaaaatgagacaaaggtatggtgatcaacatttagatggtgtgtcttggctacttttctgttgttgagccacaataacctgccaaaaccaagtaacaggagaaagggctatgattcatagttcagtcatagagaggaaagcaagtctaaggagtaggaacatgactggtcacgtggcatgggcagtgaggaagcagagaacaaacaggaagtggggcctggctatgaaacctcaatttgtgaccccagttatgtccttcctccagacaggctccaccttccaaaggttctacatcctttccaaacaccagcaccagctagggaccacacgtcaaacatgtgagcctgtgagagacacttcacacacaggccacaatagatgctagaagccagttacaaacacacatgacccaaaatatgttcaaatagtttccaacctagaaatttttcttctaagacacaatacaaataatcagaaattctactgaaaatttatctagaaggatgtccataaacaaaaaatgtaaacaataaaatgttcaacaagaagggacagattaaattttaaattattgatggtataaccataccaagggaaattatgtgggcattaaaatcatgttttataaataatgtttaatgacaaagaaaaaaatctcccataagtgaaagaccaaagaaactaaacgaaatgctgtatgatttaatgcaatgaaaatccagatttcacatttagtcttacatgcatagaaatgactggagcaaatgctttccaaatgataactgaggaaccatcctggatggtatgatcatgtatagccctaaaaacatggattattggaatgaagtccacaggagcctggactaaagggaagtcaggttatttattgcagagtcactcacaaatgacaaataaaaaagagacccaccaaggtcttctgcccaggagtggtgaaagcggcaatcagatcttggccgccatgagagagagagagagagagagagagagagagagagagagagaggagagcctgtttccagtatacatttagcacctaagaccccggcccagaaggagtcagtacctcaaagactattggctgaatgagttcccacaacatgtatgtatgtatgtatgtacacacacacacacacacacacacacacacacacacacacacccctttctgaaatacacgttttcaggattgaaaaggcaagctaccttagctgactcatcactgtacatgattcatattgatcatggtattgacatgcccatgctggtcttccccaaatggctaatggatccataaccaagaaaggaatgacaagtaacatctaggtgaggcagacaagagaaagttttgaccaagaatggatgtcctggctgacacagcacaagtatgacacctgaaaagggcacacatgtgctcaaacatgctgtaccttggaggcaagagaaactcgtggtacaatgaacatacctacctttatgcacagggcacatcgggaaggacatatctcttaccaacggtgccctgcaaaagctggaggtcattggcaaagcaatttaagaggttgactctgtgcttaaccggaaggtgaaataggctctgggaacttgcatgtgtggcacataagtaatgacagtgtgcactagttggatgcattttcttatcaaacaaaagaaatgacctagcttatcaagtcccctgttcaacaggagcatggattcatagccagtgctgttctataatcaggactgaggcatatagtagggctccagctgttcctaacccatttctcctctctagccatgggcatctgaggatagttataacttagtttgtggagaaggcccagtcatttgtcagagaagttgggcaatccgctccccccacattctcagctatgtttctaacaatatgccaagctgtgttcaagctgtgttatccatcatccatccatctatccatccatccatccatccatccatccatccatccactcactcttcaaataattgtgtgtgcctaaaatagcccctcccccatacctctggtgactttactacttcaatgaagatgtaccagtgtgtaagtgaaggatgagtatcacaggcccgtggccaaccattgcaggtaccataccatgcctaagcccagagattttattatcactgtctttattggccacagaggggaaagggtattgtagctttgtggcttctgagagttcattccttagcgaactgccaagcctcttggcagcagctcccagatcacaggaagggggatttttttttttatgactacactgcagttttcgtcagaaaagcaaaagagagaagcaggtgacatggaatacacggcgatagataagcctaacaaagctgagtagcggtcattttccttcttacctctgtgttctctccctcccactcctctgtcaactcttctaatatcccctcccaaaccagactccagaagaatctaaattggcttcacctcaaaaaaataataaaagggaaacatagagttgtttattatattctatcatgctttaaaaaatatggctctcagagcccatctcagtgtgagcagtctctctctgtgagctctgggggtgggaggagagtacagtgtgtgtgtgtgtgtgtgtgtgtgtgtgtgtgtgtgtgtgtgtgttagagagaggggggagcacagtgtgtgtgagagagatggagagtgtgtgagtaggtgtatgtgtgtgtgcctgtgtgtgtgtaagagagagagagggagagagaggggggagtacagtgtgagtaggtgtgtgtgtgtgtgtgtgtgtgtgtgtaagagagaagatcacagtgtgagtaggcatgtgtgtatgagagggggagagacagagagagagagagagagagagagagagagagagagagagagagagggagcctatgaatggcatcatgtgagtccctcctctgtgttgcagagctgagtggctctcctctctcagagcaattactacaaatgatttatgtggccagtcaagagggcctgccagggttcttatttcatctccagaaaaaggaactctgctggaatgttatcagggagcttgggattaaactgacagctgccttttgttttcccgtgaaagcttctcctctggactgtggcgctcctgcactttccacccagagagccagaattctaggctgtaaagccctgctaggaaagagccacagtaagggaactggggaggagaggtctccttctcccctctgtatttatcttcagttccattccagatgcagctggctctgcaggctggaagattggctccttattgaactgtgcacacacaagcagggcaccacatcttgactccctgttaccaagctcatcttggctgtgccgggggaacaaaggctccttgcaaatataggtcagtgaaatgtgaccctggctctcaatctctgccagactggcacatgtcaggtcacagggaatgaaagtgtgtgtgtgtgtgtgtgtgtgtgtgtgtgtgtgtgtgtgtgtgtgaagaaactgggcaagaagcaaagacaccaggttggggcaggcagagacgagctctggacacaaaccacacaacctgtacatcttctcatctgcagacatcccaactctaagagactgtggtgctaatctcaaggcctgggtcatataggcgtggttggctatagccttccctgtccaacctggtttgctggatgaagggagggagcaaggatctggccagccctgaccctgatttaaaaaatgcatttacttgcacttatacaaaagtatgcacacacatacatatacacacacatacacacatgcatatacatatacacacagatgcatacacacatgctatacacatacatgacatacatgcacatgcatgcacacaaagatgcatgcaagcacacactacacatcctgatgttcggatgactgcatcacaaaattctggagataaataatagtaaatacaaattaaagaaactctcaagggaacagagaagcatatgatgaaaagagactagggggtgggatgaaaatgaggaagcgattataaagaagaggaaggtttaaagtaaaataatggactgtaaaaatcatgtttatgagtttatattttctgtcctagccagagacattttggcttttgatttccaacttttgttcttaagtaacaccttgccaagcggtattgagtaatgcctaacacgagattaatttttatcaagtcacacataactatttagctctccacagtgtgtatagatacaaggctgtgtgcgcatatcaaactagagggggtgttttgtggttatgggggatctctgatctcagaagggaattcatactgatagagacatatgataggttagttatgctgctacacattttctgtacattttccctttattcctcagtacagctctatgaagtatttctagtctccctttacacctgttagagatgacaagtgagattaaataactcattgcctagtttgacagatatcagtagctgcccagctaatattcctttcattttcttccttagaattgtgatggtgtttgaagaaggatttcccagcctcctttgcagtttgggttggtggtctatctgagttatggctaataagatgcctgcagaagtctgggaattcctgattggcccaccccttctcctgttgctttctaatttcttctctagtctagagagcagataaggttggtcatgaaaatatgtggatgatgtaacaaccgtgttgctaaaggtgatgggaaatactgtataccttcgatgagttacaatccccttcatgtgcccctcactggcttctgactacaggagaaaaaggagacacatttatatcgtgcctctgtaatcaaccgctccttacacagagaaaatgtaatcagaactgacagcctacaaaggagagctagagctggaaccaaatcttactacataaggacctccatcatcctctgcaaccactctagaggagcacagacatgggaacaagtatggtgagccctctgcagctaacagtagttatttgtcttacacttccacgttactattggtcatcaaaggaagtcaggacaggaactcacacagggcagaaacctggagccaggagctgatgcagaggcgatgaggggtgctgcttcctggcttgctccagatggcttgctcagcctgctttctaatagaatccaagactaccagcccagcgatggcacccacccacaataggctgggccctcctacaacaatcactaattaagaaaatgccttacaggcttgtctacagcccagtcttatggagacattttcttaattgaggctccctcctctcaattgactctagcttgtgtcaagttgacataaaactatccagcacttgttaagaaccttaaaaatctcaggaattggagaccctgggtaccagaacctctatgatggggttaaccatgaaacttacccacaggagagttggttgacataaatgccatgcctctggtgagtctgtgaggcatttcttggaaggataacctgaagagggacactccttttgcagagggggaagcaccttccagatataaggagctggggagaacagcgcatctttgcttgccttcacttcctgctgatgagtaagtatttcctctcccttgctgccctcaaggtgggctgaagtccatggctctccaggaatccctctagacttttaaggtcaaagtggaactgctgaggcaaaagacttgttgactgagcagctattgtgttcatggcctcttcagtgtgcagacagtcattattggacaggccagactgtgtcatgtaagccaacctaataaattcccttcgtattatagatacatcttatcagttctgttcttctagacaatgctgaataatccaggtcctatccccaagacatctcatcactgtaagcactccaaaatctgaaacacgtcagagatactcaaacctatatttgctctccatcctggaaacatctgtggaaatctgcaactcagcagtaagatggtctcattttacacccaatcaacccacacagtttcaccgcttcccacctggctgcagcacactgcatagtctcaccgcttcccacctggctgcagcacactgcacagtctcacccttcccacctggctgcagcacactgcatagtctcactgcttcccacctggctgtagcacactgcatagtctcactgcttcccacctggctgtagcacactggcagatggccttgctgcttctagataggagtctggtatctcctttgggaaattagcctgactatgagaatgacaaatagagcctgtattccccaaggcttagaggctaaggatcaccacttgagagtccttacatataaatagcagcctcctagttagagtattaatctcttattctatgaacgtagaggcaagaatcaccacacatttgagaaagcttctaacaaaaaatccagcacccaattaacagatggaaaagagaacataaaagcaatgaaacaataccatgtctgtctagtggtgtgtgtgtgtgtgtgtgtgtgtgtgtgtgtgttgtggtgtggtgtgtgtgtgtgtgtgtgtgtgtgtgtgtgtgttgtgatgtgtagtgtgtatgtatggtgttcgtggtatatgtatgtgtgatgtttatggtatacgtatttgtaagagaggtgtgagtggtacatgtgtggtgtagtgtgtgtgcatgtggtatgtgtatagtatgtggtatgtgtatgcatggtgtagtgtgtatgtgcatgtgtggtgtatgtatggtaagtggtacctgtgtgtaaggtgtagtgtgtttgtgtggggtgtgtgtggtgtgagccacagtactcttggggtgtcagttttctgacaggaactgaggaggtcaggtgaagcatggagagcttcaaacttcctttttaaatgtgtttgcagtctggcatcctgcatccagtcggacatgagctcaacgtgaatctatttctccacatgcaagacctcaaaatacccatctctcttccctcctcagtgtcagctcacagaacctctagccatgctccttgcctctctctctgggatagagttggtaagatttgctgtggccttgaagccttgctgtccttacagatgtaggatgcactcagggtcctacctagtgaaggctttcatgtctcctggcacacaggctaggtcaggcaaggtctcatggtgtgccccgaaaccttctaagacaagaatgccatttgttatcacaatctgaagggaaccaagggatcgagaggccccagtctccatctagcagcccccacagctgcttatggccattgttctatgtctcccctgatcttcggagaattaaagggtctttctcccttcaagactccatttgcctggtggtggtgcacacctttgatcccagcactgggagcagaggcaggtggatctgtgtgttcaaagccagcctggtctacagagtgagttccaggacagccagtgctgtcctgtctcaactcccaccctcaaaaaaggacccattacactgtctatagtgcagttctctctctctctctctctctctctctctctctctctctctctctctctctcgcacccacacacacacacacacacacacacagacacatcacacacacacacacacacacacatccctcccacttcaaggcctgaccatggctgcctgtggcattgaggctctctcttctaataaagtccttgaagtgtaacttgctgtcagctcctttccatgaacacattttctaggtatagcagtcaggaagtgatcacagagaacacttcactaaaatgagtttctaagctaagctagaagagacacagaatctgagaacaaggggccccacacaggagcaacagaacaaaggctctgccaccagctccctagtcacctagcacctctccagaagggaattgaagggtgtggggcccctgggagaacagtctgcaaatgagtgggaagtatccagcgaagggtctgtggatgatttaagcctaggaacagaggaaacagaacagcacagggaaaaacaaaacaaaacagcaatgatacaaaaatccttaagttgcacctagtagaaatgtcatcaaaatccactattcagctcactgataaactatttaactaccaaatgcacagacacatacacacaaatacaaatctcactcaaagttgtgatatatatgtatgtatatgcacacacgatatatacatatgtggtatgtatacacacatacataatatatactattcatggtgaagggggaaggaaaggaaggtagttggagaagtagaagagcagagggcaaactcctgacttccatgctggagtcaaaaggtagcatcaaaacagagatccagaaacaactgcagaaatgctctcttttagaaggggattcattccaggagaaacagctggaatattttcaagctttggagaacagaaattagggtgggcagaaggatgctgtgaggattaatgcttttatcgcacatactcactagcctctcatattaagtaagtgtaatgcctggataatgacacagatcaaaaaccaagggctggagagatagatcagtggttaagagcactgcctgctcttccagaggtcctgagttcaattcccagcaatcacatggtggatcaccaccatctgtaatgagatctggtgccctcttttggcatccaagcatccatacaggcagaacacagtatacataattaacaaacaaacaaataaataaatctttaaaataataaagaaggaaaagaaaaccaaaagagccaagtccttgtccttgaacacctactcaggatgaaggatgcatcttactatcctcctgtgagcatttcccacacaggagatttggtaccttgttctctctaactctgtgcccaagatccccagagtcttggtttgtggcttcggtgcaggtacagcacactgcatgaagttcagacaatgttttggatagctggaaagtgggtgtgacctctgagagatgttaagtcacatgcttagtgtagtttctgggactcacagggtggctggagttttctggagactgcttgaatcttacttgtgtctgggttctctgactttcctgtccttggattccaaccacccacccttcaattagtaaagatcgcagggctagaagtgatggagagacccaggtgataaggacaaaggaaaactttctgctattttcatggctgcactatagaaaagaaagagcatcattagagtttagtctaatgaggtgacattagataagacaaggaaaagtcaccgcatgtaaaatataattatctggagaagatgtaacatgcaagtgcccttggatttagaacacaaaaaccaattctgatgaaatgagaataaaattctaggaaaggcagagtgggaaaagctagaaggctctgcttgtgtatgaaagacaaataggtttgttctatagcacaggattcccgtagtctatgtagaaagatggcttgaaaacgcagaaaaaagggaaggcaacaacctgaggtgttctgtgcttaataaaggagaacttgtgtgtgtgctggagagaggtgtgtgtgcatgtgtgacagacagaagtgtgtgtgtgtgcgtgtgtgtgagtgagaagtgtgtgcacgtgatagtgcacgaatgtgcttgaggtgtgtgtgtgtgtgtgtgtgtgtgtgtgtgtgtgtgtgtgtgtgtaagccagaagaccaccttgttcttagacactgtctatctgatttcttgagactgggcctctcactgttatttggagctcaacaagtaggctaggctggctcatcagggagtcccaggataccttctccttcccaacagtgccattgtaagcacatatcacagcctctggcttttcatgagaatagtggggatcaaagaggtccccatgcctgagcattttactaactgagctgccactctggcctaagaaaactcttaaagactgaattatttttcttaggacagatatgacatgatgtagaataatagacaacttttttttttttagaagttattatgtgctggttaagttcctcctgaaaactagatttttttaaacttttttctttaaatttagatatatgatgtatgttcatggggttaacgcttccaaatttacaaaacagaaacaagatacaaagaaatgacatatttaggctgtcgagatggcgcagcagttaagagcttctcttttggagaagacacaggtttggttcccagcactcacactgggcagctcacaatccccacaactccagttccggggggaatccagcaccctcttctggtctctgtgggcacctccacatgtggtacacataaatacactcaggcagacgtgatcataaaagaaaaatcttaaaaatagaaattaaacaatcagtcgaataatacaagcagcaagcaatagtagggtgggactccaatggaaggctccaaatttccaagcactcagcatgcctatgtctatgaaattaaaaaatttaaaatacttatcaacatgcagtgatctagccaggaaaaaaaaatccttcatcatcggggagttttttttaaaaaggtagtactactatattgtgtttagtttttgctttctacagattccaggtcagggttcctgaattcagctgggatggagttaaaagtttctgctcagtactgaagttttctctgaagatgagtttcagaaacgagatccaggctccctcccttgtctgtcatttatcttagacctcaggaggtaacagcagcttgagctgtaacacagccacaatgaagatggcagtgaacggtaataaataacacttccaacgcttgggccctgtgcatcagaaaaaaatggaaagccactcaaggctttgaatggtagatatgccacatctgtgcatatattcaccctggatccaacacaagtcttttaagatgccaggctctgagacctagccgtggtgcgtcagtggggaggggagaagcagagataaaaatagagatgttgattgcattgttgctaattcagcccagctcaacagctccagccggggtgagtcaacagcagcggttcaaagacacaaaaaggagaggagcagggtgctctgtgccactgagcaaaggggactcggtcacaccagcacctctctgactaaatagacccatgacactgaggctgtgtggtgtgagttcaaaaacgaacaagtggaaagcagtgagggacaaagtggctgcagatcgatggacagcagagggctgacccactggcaaaaaagctgccttttgtaagactcctgggctgtgggggatgggcgaaagagactgagcttagaggccaacttccactcttcaaacacagtattgttttctctggggcataaggcttactgccattccagactggtctccatggcagcaggggaggaggaggggagaggaggaacagatgggggtcatggaggtcttaattctaatgcagaggtcctccctgccagcccctctctccttgaggacctgtgacatgttgcaccatcttgggggcccaggaagcctctggtattagttcaattcaactggccagatcttgggaacctactttgtgttagtcgttcgcttctaattggcaggagcgtctgttcagtcagtctctgcttggttggaaagctggaaatgaggaaaagacctactttctgttcctttagctttatcttttcccaatcctaggctacacttcttcacaaactgaagatatgctgccacgatgttggggtagcagaaaggaggaatgcacacttgctctcttgacccagatgctagctaaccttacagcaccattggaaagggtgagagagatagtcactctgcagccttagagttcctgggctgctccccctctttctagctcctttgcttgtgtacgatactgcaggatggtgcaaggtcaaccgttcagaaacaaactccagccatgacatttccttcactatcattaatggtgaccccaaaccactatcttggaattcaagatctgcccctgcctggccttcctcactcttaataatcattctcttctatcttttgaatggtttcatggccttgggggacataataggttgaatgaatgaatgaatgaatgaatgaatgaatgacaaacgagcaaacggacatcaaagaactcacttttgtctccattttttttttttttgttttggttcatgttgttaccatatctcacccttgaaaataaactttctcctggcttttacctgcaatttctatcaaggtctagttcatagctcaaatgcactgcctacttcatatgattcaaatgaaatacatcatgttttacctctaccctctcagggcctggagccatcactatcactctgttttggaagccaggatccactctccctcaggctccattttccactatcagcaaggcccttttccttcctcagtgtctgttgtactgaattccattcactccctcctgtctctatttctcctcacccctttccctcagccttcaaattataggactaaagttgcttccaaataagtctctccatgtccactcccctccaccagctgtgtggtcagatggaggatttcaaaatgcaaatataatccctccataacagcctgtctgtaagtcttcagtggcttcgcttcacttttagcatggtgggtacagtccttgaatcaacatgaccctagcctattttccagcttcaccccctcacttttctcctcttatgagctgtgttccttggagccctgggatctcatgacactatttcttctagttacaatgttctgcctctgctgtttgaacactggttcccaaacttcaggattcaccctagctatcttactatctcatggtgaacaggggagcattactttgttgtataatgcacagttctgtcacttgtagtaacaaggctggagtggggggaataagttaggaatagaacagcatcctgctcgaacatacatggaagcaaaagagttgctctcacagaaacagagagcagaagagtggttgctagagcctgggagtgggagagggaggactggagagaggatgcttaacggggacaggaatacccaccactgggtaggaagaaagaacttgccaacgttctataactgctatggcacaacaatggctgataacagtcccttaaaatttcaaagtgggttacacaaaggattccaggatcttccccaaagaaggaggtgacctttgtctgaagtgacaaatatgccagtcgccctgaatcgatcattatacattgtatacatggtgttactgaaatgtcatagtgtaccctgtatgtatgtgcaactactctgttttggcatataaaaacatgccaaaacaaaagcatgtggtgggtggcacatgcctgtaatctcagcatttggaaggccaaggcaggaggattgccatgaatttgaggctagcctgggatacagagtgttatctccatggcactgtcctttgcaggggctctacctgggcatatgcttgcttgttttattggtgtctttctctgtggatacaaacatgggcatgaggctaggggccatcttcatttgttgtccccgtcatttgctaacgatctggcacacagcatataattataaatacttatccaaacaagaatcatgtcgttgacatgggaagggcctaggcctggcctaggatgatgtggtagactttggggagccccttttgagggccttaccctgcctggggagtggaggggggatggctaggggcaggtgggatgttgggaggaggggagggagagggagaagggattgacatctgaagcaagcttgttcctaatttgaagtaataaaataaaataaaaattaaaaaaagaatcatgtcattgatgaagctttctgtagtcaactgaggatataccaccactgcttcccattttactggaaaaagcccagcttgcgcagaatgatatatttttagagggtccttggaataggaaaagcatcaaatactgttgaatatccgttaagagctggagaaaccaccacaaaacatccttctacccatcatgaagcccacctccttggctgggacaatctaatgatacagtgcactggaggagtttagtgtacagtccagactgtagcacaaactcaaaagtgtcagctatcattatgggctggcattagaatggcctgcacaatcagaatttttaagctctgtctaatttcaaagactctgtcttaaggtcacattccttgactttaatctggaaaaaaaaaaaaaggatcacgcatacagactctatcaagtcagattcctgtagtatgctgtctgtgtctcgatgtagtagtcattaagtaactgctgtatgagatcacttgacctgcacacagaggagtaagaacctgtctcagtccctccccattttcatcccctttatatgctgctcccagaaggctgatagtacagagtttgtctagcatgaacaaggctttggctctgatccttaccactgccccaaaccgaaatcagacaggtacagaaagaccagctaatatgtgaggcagaatgaaattgcaattaaatggagggacacatgaacatctgggaaaatggaaaagacaagtgatttctggataaattggcatctgattgcaccagggcagaagagagaaatctctggagccgaggacagcagtaaagtatgccaagacatccaggaggagagaacttactgggctgaggttctgactccatgtagtgtgtgggtcaccaatggaagagaagaaaacactgtgcattcatctgtgagatagggaaggagggaaggaggcagacagccaatcactggcagctgatgtacacctgtgaacacgaggctaagaggcagtctggcatctaggtagcttgtttccaattcagaagctgcacagtctctcatcacattccctgcttagaggtgactgaggaaggacaggtgtaatgtccacagtcacttagatggctaggtgggcaaggctagctcactttgggcggttatttcctcctaactggcttggatggccatcaggtatatggccacaggaggggacactattttctgaacactccactattctcagagagaggattatgaaagcaagatcagccaaaccctagggtaatgacgtagctttctcacaaatgccaggctatgatttctctccaatttaatcctgcccagctaggcagaacttcccacccaaccctcattcttggtattttatacgttaaatcaaaagtccttgtaggacaaagcagttttcatttacaccagatttccagtgtgttgaagaagaagctctttttctgctctgatccctgtgatattaagataatatctgaggattggacttcgtcattccactcatggtgctgtgttcagcacgggaagctctatgtccttctgtttcataacccatgtttagagaatgacctcttttattctcctgctgccccatgccatcctcccctctggcaaaaagccaaacccaaacctggtgggttgatggcatcctttcacaccttcatcgctaatttgatgtgtcatccaactggccaacttttcttggtatcttggtgatgaagcaacagtcatacaaatggtaccaatccctctgcttttcgctgaaagggattgattttgaagggacatgaaactacacaaatgcatagctcatatgaaagtatagctttcagtgaagtatgctttaaggtcaagaagaaaattaaagaaccatcaagtaatttaaagcccgatgtttgggtattctaccatttcttccttttttttctttttcttaaaaattatttatttgaagtgtgtgtgtgtgtgtgtgtgtgtgtgtgtgtgtgtgtgtacagatgccataaacatatgtggaggtcagagtacaacttgggggtaggatctattctttcctttcactacctgggactgagggactgaactcaggtcaccaagcttggcactgcatgctgctaccgatgagctattatggcattgtcccctattctgtcaccttactggaacttaggtagttaagaaaaattaattttcccccattgttaaatttttccctaggttacttcttaaaatctctagtcttgatttaaagatgaaaaaatccttcatttttcattttgttaaaaccaaacatccaatctcaagctgtttacatcgctgttctttaagataatgaaactgctctgtgtgatgactcatgtctgaaatcctagcactttggaggctgaggcaggaagactgctttgggttagagataagcctagactacacagaggccttgcttcaaaaatccagcgaacaaacaaataaaagacaaaaaatattgggattggagcccattttcgtgatggcttgcatctgtgttctcctagactgtaatcctcactagctccaaataaatataaacttcccttgtccttaaaaaaggaacaaaaatattggaatcatatttttataattctcctttcctcacttactataccatggacccccacggcattaaacattattttatggtattttaatagcagcttaatgtcccataatttagtcaaatccccactaagaccctcctcaattatttacagatatccatactatgatgagcatcctttatctgtatgcattcttttctttgtttccttctcttcccttccctcttctttccttttgggttgaactgagccaggaaagcattccaccatgaagctgtattccagcccccatttttacctattattctgagacagggtctcactgagggactcatcctgtagtccaagcaagccttgtgcttgcaataatcctcttgctgtagccgctcaagtatctcaggtcataggcctgtgccaccagattctaaaaccacatctgttcatttattgttttatttatttgtttattgttacatggctgggaatggaattctgggtcttccactctagacaggcattttaccactgagccacattcttagctctctgatcatactgttaaaatagctttcttttagagtcaccatgtcaaggaagaagagcgcttggaggagctcctcccacctgcactagcaatgaagaacaaggaacaaccagtgagatgcaaagggagcagagaggtggctgttctagcatgattctagaatgttctaaaatgacaaggccatttctactgctcagcttaacgtcagtcttcatttgtaacccggagccaagacaacacttttgggatagttttgtgtctcttgtcagcatttccacaggggaggaagagagcatatgccacagatctgcctaggttcgggactgtgaggtaaagagatgggcacacacttgaacaaggtgactttttttttctggtatgggtaccaccatcagttttatcattacctccatcacaaccattactgtcactatcaccaccatggtgacaataaggatctgggaggtcctagaaacaagggcttggcaacttgagagggctgatactggagctaactgtgcttagcatggagttcctgttggagttctggacagaggcctcctgccagcttcacatggtttctcaggcaacaggttcacagcaggaacaatccaccctcatgcttttcggtcccaggaggccctttattggctctagacatatggccaggccacacgttctccacccttaaacacagcatctgccctgtcaggaagagggcttcctttgagtctgttcctttcactgaccacaaacaaggagaaagcagctgcagaacggcacgcagacactaggattccggctggatgactgcctacacgaggcagtacaggcccccttccgtgctctgccccacatgtcaaaccctaatcaggcagggagccagtcgtcctcattgcagtctcagttaaagaatgggaaaggaggctgagaactgtgttttgctttttcactagatgataccatcagcattacagcagagagggaggcacacagcccagcagcagaggtgtgtctggcatctttgggctgcacatgtagaacaaatacacaagagaaggaaaagcacagagttagatttaataacatggcccctatagaaggcaggcctggacaactgcggagttttgtcttcgggaaactcaaggtgctggctcattgtccttagaacatccataagtgattctctgtcaactagattggagaaaatgtaatagccacacctgtgattatgatcattgttaggaggccacagggcaaatcagcatggaggcagaaaagcaaccaggaactccaggagttccaggcttaatgcagtgtgtgtgtgtgtgtgtgtgtgtgtgtgtgtgtgtgtgtgtgtgtgtgtgtaaagaggaggaggagaggaacacctgctaacaacagaccttaccacaaaggcaggactttcaacaacttcttacctgctgtccaactcagaccctttcctggtgtattcaaacacagacagacagacagacaggcagacaggcaggcagacagacagatggacacactcacagtcagagctgatgcaaccaagagggaagtacagctgctggtctcctgcctctcatgggtctgcagcttcagtgtgtgtgtgtgtgtgtgtgtgtgtgtgtgtgtgtgtgtgtaggtgcatggtgattttccataccctctatgtttgtgtgtgatcaggtgaatgtggcagcttgggatgaaactgaagtcaggagtggctctgaggtcatgtgtcctggtctttttctccatcttccttcactgagtctactctctctcttttccactgtcttacatgctgtgtaacatatatgtggtcactgttatctgcttaaatgggagtaactgcagggtagagttcttcattttaagcacctaggtcagtggctggcatgaaagaggtgcttggtagatttctgtttaaggaatgaatgcttattagccattctaatttagactctagttaagtggattgatgagtgcagagacttactcatctgcctgaaatatttccactccccctctccccagccctcaggctcagcacagctccccctgtccaagtcacagttgcttctgacacagccaagcaatcactgtcacttggccaaattgaggaggaagtgaaatatttactggagcagaaattccaggggtcagtagcctggcttgtcctcacataagtaatgatggttagcgacaccccagcctaccttagtgtttacttctgaagcacaactggccagagtgtggtttcagtcagtgattcatgaatattcaaaattgtttcacatcttcaaagtcttcatattgtcaccagaaaaaaaaaaatcctaccttaaccgtctttctagcctcagaatgccttatatacttactttctgtatttctttgaaaatggtcttgaaaactatgcaagaaaaatggagaataaaattaaagtcacagactggcaagatggcttttgtgggtaaaggcatttgctgctaagcttgactactacttggaaaatcagtcttgagaaatgacatagttgaaggagggaaatgactcccacaagcataccacacacacacacacacacacacacacacacacacacacacgaataaatgtaacaaatggaataaatataatcgatcacaatgaaacaaggggcttattagtatctcccagttgctgagatacaaagagtaaatagtttgccagccaaaccaagacaagcggcataaactctgatggacggtttgaggcagagtttatataggacactgtagagacagtgtcctatgtctaaccaggttccatcacaatagaagatgggaaagggctaacaatgtccaagccctgtgatttgcatcctactcagtttgaatcaaagggtcatggatgttgaatccaatattcatagtgtcgatttgcactaatttcaccagtttgtaagtatcaagcaagtctgttcaatagttgacctagcaaattaatctatttcccctattagtttttcactctttagcatgacaatatcagatacactgttaaagaaaaggccagtgcaaacttcctcctcagggatgcatctgtctgcttgccactcccaccagcccacagataatccccctccccagttgcagccaggtttctatttttcaatttctaaccacaatagaaaaagggaagaaggactctgattttccggagggaccacacaatcagaaaaggtactttttcaacatcattagcaattcatctcctgaaacctcagggcagcccctaggcagcccctcctgcaacccccactcccacccctacccccacccctacccctctcttttggtgtcggcttatcaaattaatgaagcctatctagacagaggaggttaggatagaaggcagcagcttaagagcaatttaatgcaaacccctccccaccttacaaaataagcatataggggggaaaaatcagaatatctttcatagaatgagaagaacaaacagggtgttgggggtggggtggatggctgagattgtctccctgtttggtgaaggagggagggatgtgtggtgactttctctggctggacatttgcatggtaaaaaggtgccattcatttgtgtacaggaacagtctgggccacactttctacttggtagtgcagaattcaggctaaggacttctggtaaagagtgaaacaactccttgcaaccttccctctcatcttttggtaacacaccttccctctgtcgtgctgaggtggccagggatgagatttctgtgacactgtgcatttgtgcagagcattggtgggtgacagatggctgatcccacttggggcagcagtgagctgcaaggcacagggcagacgacaggggcctcagagcctcccattttgcttgtatccggagagccaattttcaatgtgagttacaaaacatcaacatctctcatcacatcactgacctaaatatagacaatgacttcaaggaaaaaaaatagttgcatgttcttttatacctgtgaatgctacagagctcctccaacaagcaccaggcaatggggaacagatgagcagtgagataggaagtcagaagagcagagatgtgcctgttctagaatgatcactgcaataaggccattactgtagctcagcttcacatcaatcctcatgtaacccaaggttgagacaatagtttagaaacggttttgtgtcccttgtcagcttttccatggggagtgatggaaggggatgtccccatcccctgcagatgtttctagctaagctgctctggccaccagcttgcagaggtctctgatataaagagaaaggctcatccttgaccaaggtgccattttttcccacctgagaagactgagctgtggtgccttgtgctagtctgtgagagtgacttccagccattcccaatgcctttgtcacaatgtccaagtcccttttcacttggtaacactgaggtgggcaggctcaatagtgtcaggcagggttactttgtctttcctggatgagttcagagttgggtccaatgtttgaatgctgtgttcataagagttcatacctaattcttatcatcccactgcctgaatagaaggctatgctggaagcttttatgagcacggatctcacatcacatcaagggaccttgggaaaggtacctgaacaaaacattaagtacagacagcgcagtggtatcagcgattaagactcaattgtgggcaatccatctgagaaacagtcacatgcctctcacatatttctaatgctcttcctgttcactcaggcaactatctgcatgagaacaactgcgcagaggctccctgagtgtagcataattgcctgctgttagggaaccagcaagccacttcagacttaagctgcccagaactccatcatttagcctaaaacacaaacccacgctcttttgtgtcagcaaagtacccccaaatgcagccatcaatttgtttcttcagagaacatacacacaactctggcagaaacatattccaccactataaaaggagccttatttcttggaaaataatagcagagaatagtgggaagggcactgactgcacacaagctaaggaagccaagccaccaggacacgtggcaaaaacggagccaaaaccaaaaccaaaaaacaaaacaaaacagaaaacaaaaaattccccccacaaaatcaaaccctaaacaaacaaaaaacgaacaaacagacctgcagtagaaacccagcactagtaaatgagaagacctaattaaaaataaacaaacagcaattatttctgctaatggagagccttaagtgccaaggttaatagtatctatgcatggtcgtgtgggctggaacacctggcccagtgagactctgttatcaccgctcttctgtgcatcatggctaagttaaagcatggacaaaggtcagaggtgcacatttagaaataaagacatcagcaaaggtgatagacacagcagctctgaagtgcaggtaccacaactggaacaggaatctagttgtcctgtgatgtgtaggggatgatactgacagccttgctcttcagcaaggaaggctggctgctgaaagttcctacaaaggaccttgaactgggtttgtgtgaagatccagaagatgctgacagcagtatgcttcgctatagggtcttagcttccctacatagacttttggaaatagcactttgctagcataggtgagtgcaaaaaaaaaattataaaagacttgggggaggaggagaaaagcaatttggtcatgaagaaatacacccagagtcatttttttccaatccaatatctttgttaattaagcatttttccatcttacaatgagaatacgaatagcaatcgaatactataccactcattactaataaaacatatttatgaaatggaaatataatgtgcctatttccaaaatgtggttataaatgactgactctaagccacaatttaaagtggtttgagaaatgagtctttaataaagaattgatgaggatgatgactgctgaaaataattctatttggtaagattatgtggcttgcttatggcaatttgagctgaggtgattgcctcaaatattacagcaagtaactaatatagggaaatttaattgatgataaatacagtggttgtgtgtaattgaagaatcctgcatcctctcctgcactaattacatccagtcatttcagtgctgtcaaggtgttatttatctggtatatgtgcacatagtaggggtttaaaaggtgagtgaataagtgcctataattagtcctcaatgtgggttccttcgtacaattatggttaagcagaaagccattaacattaaggaaaaatataatacggctccagttagagccacactgcatctgcgatggtgaaacggaaggtcagcacgtcagaacacccagatcttaggacacattagctctccaccaattaaagcacagctgtatttttaatgatatttagaactacactaataggcacttgatataacttccttggctatctatccctttgactggacaaagaaagttctctgtcagcatagacatgaatagatctctctctctgtctcacacacacacacacacacacacacacacacacacagagagagagagagagagagagagagagagagagagagagagagagagaaagagagaggtcttaggttgtggtactacagagaacaaaaagacccagtgtttaagagactgaaagaccagtgagaaagatgggtgaatacacagcagaagggccagctcagaaaacacaaggccaaatgagaatgggccagagaagcattttcaagagagatttttatttttgtattattattattttggttttttgagacagggtttctcaaaaattgctttgagagcctatcttggaacttgttgttattttgtaaaagtttaaaaattagaagtctcgagatggaacctggcgcgatggaacacgaaccatagagaacataaagagtatattaaccgggctggagagatgtctcagaggttaagagcaccaactgctcttccagaggtcctgagtttaattcccagcaaccacatggtggctcacaaccatctgttatgagatctgatgccctcttctggtgtgcagatatacatggaagcagaatgttgtatacataataaataaataaagtcttaaaaaaaagaagtttaaaaaagagtatattaaccatagagtttattaagagacagaatgagagagaggagacaggaaggtaagacagcgtgacaataagagaagagagtgtaagtgggcgggggtctgtcttttaaaggggtcctttaccccttcgtgcagacttagttcccatggaaccctgggctgaccagggtactgcctgagtggtttctgtcaggtaactggggcaggccagcataaggcctgaacctttcagaactctctctgtagaccaggctagcctcgaactcacagagatccacctgcctctgccttccaagtgctgtgattaaaagtgtgtgacaccaacgcccagcttgagataattttttaaattaaatgatatttattattattgtgtatgagagagtgtgggcatgccacagcgttcctgtgtaagtcagggagcaatgcttgggagttggttctctcatcccaaggtagaacctatggatcaaacatcaaccttgcttagcaaggaagtacctttcgcccattaagctgtgtctcctgctgacctaaaagataatttttacttgctttgggatgggagatgttaatgaatgaatagtttttccatgacgtgaaacaaggtaaagtgaaaatacacatgggatgtcggccccaggggtctgtgggaaccatctgctttgccttcccctaatgatccacaacatcagggtaacaaaaaggcgacttgagtcaaaccatgagcggtagcttatgagttagatcaatgctgccaaaggctcccaagaagagaaatagcctgtgggaagacatgaagcttctgtgtttgaacaaatgccccattgaaccccataggatgcaagaggcagaggaaggagaggacactgcctggggtgactaatcaggcagatgatgaagttgtctgacaccgagggtctgcagtctactgtgtggagatggatgcctcagaaggagtcctgctctccatttgtagtgatgtttttgtatgctgtcataatgagtagaaaaacaacaattatatataaaaaaagggttttccaggccaagagagatagtattaatgtgcaaacatatactcataaatactacctgctcttgtgctatggtagaaaaaaaacttgtctactatggtttatgttaaaagataggaagtctgtaatttatttaggcatcttaggctgcagacaagttgctgtcattttaaggaactctgcaccggaattttatctgcaaatctgagaaccctcattttaaagaagacatcaattattctaagccataccagagagagggcggcctttgtgacaatgggtcagataagcgtgctggcgggaagagttgtagaaggcgggaagagttgtagaagggactggcaatgcctggggtcaggaaggagccaagtgagaagtttgaaggctttctcaggtccccagaggatgtgtgtaaaacaaaagaacaaacaaacaaacaaaaaacaaaacagtttctactgcattactagatgtgtggacaccgtacggacacatttcatttgaatgtctaatcactccacatcttaaaacagaaagtggtgacaagcaagaacttcacagccattctcacagtcttggaggggattctcaattttgccaagagtcaagctagatgaacctgacacccttttgtagccccagctcatctaaaaggccagcataccctgaccatcacaggcccctataatgtcaaaatcaccaaatggtgtatatgtctagtttccacatcaaaataatcaaatacttttgcatatttggccagtgtttgagaaagagggaaaataggatgataggttcctgttatttctcttttcctggaagattcaggcaatgccatcccatggatcgccactgacttctcatgaaactggggactgagcgtaaattaggcattggttaggaaacagagatttagaaagagttataatggagggcacaaaggattccagagttatgagccctgatcaacagaagtggttggagtgagtgctgctggggtgaaatctcagaccctttctggtcccaatgtgtgcctatgacacagccatggccactactccatccccttatcctgctcagagaatagaggaggtatcatttttcatagacaagggacaggcgatgaggtcatggaggggaggtttctaatgacttgttgctaagccagtctaagtatcaagttcacacactagagatctatttctatctattatttcccataaagtcctcagggtaaaaaataaaccacgctgttgatttcacatttttaataactttttaaggctcataggaagctctttggatttgtttggggaagaaaagaccactccaagtattaaaagaaatctggattaagtgtttccagactttctgataacttatcagtcccaaactcaagcccagggttgggcttgggacctttaagccagatgcacaaacccgaaagcagtccggttttcatacaacacatctttcctcatttactggaaaacactcatgttacacagcaacatttttctgactaagagggtgtggtctgttcattccactgaccaagaagagcacagaaagagtatttctcacctatgaagcgccaactgtgtgtttatgctgggagcacactagcccttggcatgggaacaccttctcttatgtgtgaccaaagctgagatcctgaccatgtggtcaggagagagagagaaaaaaaaaaaaaaacaatctacagggacatgacaccacaaggaacaaaggccatcgtggctctgggagttgatcctctctctctgtattttaaacgtgggatttggcaaaagctgggaagatttaccatcagttcctctcactcccttaaagtgaagcccataacctttgttctgttttctggaccacttttcctcctctgcaaatggatctgtgtttcccaatcttctctttggtcttgatccatcagcaggcattttgtctggtatctccttcctaaatcctctgcttcagcaatcagcatcacaaaagtcagtacttaaaaaacattctaagggttgaccttcaggtgcctataatcatgtactctgtgtaacctaatgactggttctttggtagtaagtttatgtgtctaatatttgtgcacatgaccctgtgaccatcatggatcttaaacaataaccttggaaggagggagacaccactcctttatttctggttaagaaaaacaacagtccagagagcatactagtaatttatgattttgctggtgtattatcatccagtaataattgcaacgtgaaactgccaattatctcctaagaggggtatcaccttttctgttgcgaattactacatcaataactgtgggttcagcactcttactttcctgtgtcactagcagtttttcagcagaagaattgagccagaaaagcacagatcacacacacacacacacacacacacacacacacaccctcagtcattccagtttcaagcccaggaatacatagagggaacaagaagatacacacacacacacacacacacacacacacacacacacacacacactccactggtacccagagagggccaaggaagacagacaaggaagggggaggggtggtgggattgcctggagcagtcaagaggtcacaggcacaccgtgatcagcagcaaactcagtttacaaagagacatctgttccattgctccagtgcattgtggctaattacatcctggcccgtctgtgaaatgacagccacttattctccagtgaaccgtaaaatctgtacatgttcgattttgggagtgggagagcaaaggcgtggaggctggagtggggggaaggggcgcagccaaagggaaagaaaaggcaggagggactactttcccacaagagagcatgataaggtacaagaaggaagggtagaatcagaggcttggcaccccaggccagcatggacatgaaggcaggacactctgaccagactgctattacccttccttcctattcaacgactacagtgccaagtattggtggcctgaaattctccattatcattgccctaaggttgtggcttggggacagacttactcatttgctgtagtttcctggggtttgaaaaagaggcagctggtaggaaccagggtgcagccccagatgggcagggcaaggttctcccataagcctcctctaagtgtaggtcacagcatccatttccaccggacccctgctttcacaggaaagcctctttatcatacactgaggatggaggctggcctccatggagacaggaattagcactaagcattcctaagacggaaaaattcatagaagaagccctacagtcaaaaaagactttccctatgattttgattgacattaaaactttatcttaacaaaagtgacaacaacaacaacaacaaaaaccagtatcacttatatatcttggtgacaaggaccaggggaatagaaacagggactagagacaggaccatcttgaaaatagacttcaatcgactgtggggtttagtgggggtgcttatcattctcacacaaatgctcctgccagaagagtcgtacagccttctgttggaatctgtgtaaaacccaactggcgatatgacagggttcagctaaggttaaactcgggtctttcttcctctcggaacaatgctgggttctgtggatcacatgtacagtcataaaagtcctggagaaaagggttacctcacacttctactggctcccatctgtttcctcatgtggagatccaggctgtgtaccccagacctggtgcaatgcagactcggatcccaaaagttaaggttggggcctttgtggcttcatgatggtgtggaggctgctggccccaggacaggagggctctgaagtgctgagacagctagcacctctgtcgagcctttaggctggcctaatgtaaggggaggcacagtcagtgtgccacgaacacgaggcaacccatgaaaatgttgtagaaatttttactgattttgagtcaaagtaaacaactctgtgttaacgactgcatcatcataaaattaatgagaaggtaaccaaccgctgtctgagagaggaggtccggggagttaaacataattagagaaaaggggtgagacacagaataagccttgattttatgcgaaccccaagaagttaattttgttcagtttaaaaggggaaggcactcttaaaagagtcctgaattttcgctcccatcctgccagtacattgtctttttgaccaaggaaaaagaaagagctctaacaaaaatataaggcgagggagtaaaagaaagacatccataccctgatggaaattcttttgttttgctttgctttgctttgaggatctcatcatgtatccctgactgggttagaacttcctatgtagagaaatctgggaccaaactcacagagatctgcctgcctctgcttcctgtaaattattttatttatccctactgtccagagaagtcagaagagagattggacaccccccccctcacataactggagttacagacagttgtgagccgccatatgggtgctgtgaattgaaccctggtcctctgttttatgtatacagtcttctgcctgcatgccagcagagggcaccagatttcattcaaggtggttgtgagccaccatgtggttgcctggaattgaactcaggacctctggaagaacactcagtgctcctaacctctgagccatctctccagctctgcagccattgttcttaactactgagccatctctctagcccctggtataaattcttgagtagtaggttagatccaagtaaagttaaagtttatgtaaaggttttttctaagagcagaaggcaaagagagatgacccctgggctcacagtgtgtataagaaccctggtttgggtgcacatttgtatttctgtgctatgtgagtgatggatgtagctttggctgtagggttcctgatagaatgttataaaaacagtgtttactaggtggcactaactgactaaacacagagttcagtgctcatttatttttgaaggcacatggcatggcttttgttttggtccatgtcatctttctttaggactctgaaccgctcagtcgctaagaaccagacacccgtgagtggccagtgactgagttcaagaattcagtcagcactgggcagtagccttcaaactgccatggagtacaattagtttcaaggctgatggagtctagagatgaagtacgttgatctctccaatttatcaatggagtctgtgcccatttttactcagtgatctttgagtaaaatcttagctggtatgagcacttcaaagattcaacttcccaatccttgcttgagtttatctggttaattgctgctgctgcctctaactcaaaatgtgtaatttcctaggaaagtccttaatgtcctcaaagggtgacagaagaacagaagattcaagtattatttcttttctttcacttttaaaaaggatataaaacattttaaagtgtgtgtgtgtgtgtgtgtgtgtgtgtgtgtgtgtgtgtgtacagtgtgcacatgtgagcacagaagagcgcatgggatcccctggaggcagagttataggcagttgagagccaatccacctagccatgccacgtgccttcaaaaataaatgagcactgaactctgtgtacctaacttgggtcctttgtaagaataagatgtgtttttaacctctgggccatctctctagccccttaggtattatttctatgaaggaattaattgtggctcaaaagaagtaaatgcaaatgataatgtgagaaactccactgaaaagatggaagtgggtaaccgtttaattaagggaatccatcttcagcaacatgtccttgcttattcacaaaggtaccatcaggtcctatactagcggtgcggatggagttctacaagagagggaatgacattgaaacatgtcaggggtgctggggcagatggccttcgatactctgtgactcaaattctaatcagaagacagcaagtctcccccactgtgtctctttacatttatggagtttctatagatcaagttacgttgtaaaatatacaaaacaatggctacaaaacagagaaataccagctggggccaaaagtgtattctaatgaccagatgaccatctacatagcagccacccactctgcctcagccttatattgtctgtgaactcattgaaaaatgaagcaagctggagaaggaagttctgagaaagacatcaatagaatcaaaaaccagactttgtgcaagagtgcgggagcggaagttatgtgggttatgaagagttgttacagaaaccacttccaatgcaaatggcatggccaagttcattcagttatcaaatgctgccgtcttcatgccacatattgggctggccagactacaaaataaaaaatgaactctactatggatcctatgaacaggctcctggagtgtagaagaatgttggggccgtccttttttttttttttttcctcagatttttttctaaatttgaattagaaataagattgttttacatgacaatcccagttcccttctccctcccatcctcccctaccacccccccccaactaaaaccctacatatcacatatcctttctgctccccctggatggtgaggccttccatggggagtcatcagagtctatgatatcctttgggatagggcctaggcccacccccatgtgtcttggctcagggagtattcctctatgtggaatgggctcccaaagtccaaaactatgctagggataagtattgaactactacaggaggtcccatagatttccaaggtttcctcactgaaacccatgttcctggggtctggatcagtcccatgctggtatctcagctatcagtctggggagcaagagctccccaatgtttaggtcagctgtttctgtgggtttcaccagcctggtctggacccctttgatcttcactcatcctttgagtgaaggacagtatatctttttgcagtgcctttttctctccatctccaggggcacacaaatagtttgacagccttgttgtaagcaaatggcttgcgctatcctctttcattatcaggggagggcatataaagtaacctctcctctgttgcttaggttgttagctgctgtcatctttgtagatctccagtcattttcctagtgtctgatttctctataaacctaaaatgtttccctctattatggtatctccattcttgttatcttctattcttcccctgactccacgtttctgctccctcatgtcctcctcacccctcctcttctccccttctcattctcctagctccctcccccctcttcctgtgctcccaatttgctcaggagatattgaccctttcctcttctctaggggaccatgtatgtacctcttagggtcctccttgttcactagcttttctggcagtgtggattgtaggctggtcatcctttactctatgtctaaaatccacatatgagtgagtaataccatatttatctttttatgattgggttacctcgctcagaatggtttcttctagttccatccattttcctgcaaatttcaagattccattgtttttttccactgagtagtactccattgtgtaaatgtaccacattttctctatccattctttggttgaggggcatctaggctgcttccagtttctggctattacaaatagtgctgttatgaacatggttgaacagatgtccttgttgtatgaatgtgcttcttttgggtatatgcctaagagtggaattgctggatcttgtggtagactcattcccattttcttgaggagtcgccatactgatttccaaagtggctgtacaagttggcactcccaccagcagtggagaagtgttcccctttatccacatcctctccagcataaactgtcattggtgtttttgattttggccattctggcaggagtaagatggtatctcagagttgttttgatttgcatttccctgatggctaaggatgttgaacactttcttatgtgtctttcagccattttagattcctgtgttgagaattgtctatttagttctgtaccccacttttaaattggattgtttggtgttttggagactagcttcttgagttctttgtatattttggagaccattcctctgtcagatgtggggttggtgaatatcttttcccagtctgtaggctgctgttttgtcttgctgatggtgccctttcccttcagaagcgtctcagtttcaggaggtcccatttatcaattgctgttctcactgtctatgctactggtgtaatgttcaggaagcagtttcctgtaccaattaattcaagggtatttcccactttgtcttgtaataggttcagtgtggctgggtttatgttgagatctttgatccattttgacttaagtttgtgcatggcaataggctcaggtctatctgcagtcttctacatgtcctcatccagttatgccagcaccatttgttgaagatggttcctatgttccatcatataaatttggattgtttgtcaaaaataaggtattcataggtgtgtgggttaatatcagggctttcacatctattccattgttttaggtttctatttttgtgccaataccaagctggatgatagctctgtaatagagcttgaagtcagagatagtgatgcctccagaagttcctctattgtacagggttgttttggctatcctgggtcttttgtttcttcatatatagttgagaattgttcttccaaggtctgcgaagaattgtgttgggattttgatggagattgcattgaatctgtagattnnnnnnnnnnnnnnnnnnnnnnnnnnnnnnnnnnnnnnnnnnnnnnnnnnnnnnnnnnnnnnnnnnnnnnnnnnnnnnnnnnnnnnnnnnnnnnnnnnnnnnnnnnnnnnnnnnnnnnnnnnnnnnnnnnnnnnnnnnnnnnnnnttggtttttcgagacagggttcctctgtggctgtggaggctgtcctggaactagctcttgtagaccaggctggcctcgaactcacagagatccgcctacctctgcttccagaaaaatatgctgggattaatggcgtgcgccaccaacgcccagcttttttctttttctttctttctttttttttttttgagattcaaaattcttaaagtacaggtctttcacttttttggtcagtgttaccccaaggtattttatgttgtttgtggcaattgtaaagggtgatgtttctctgacttctttcttcaccagtgtgtcatcagtatatagtagggctacctatttttttgagttaatcttgtatcctgccactttgctgaaagtgtttatcagctgtaggagttccctggtagcattttttgggccactgatgtagactatcatatcatctgcaaatagtgagagtttgacttcttcctttccgatttgtattcccttgatctccttttgttgtcttattgctctagctagaacttcaaggacagtattgaaattttgtcaaaggctttttcggcatctagtgagatgatcatgtggttttttttcccctcagtctgtgtatatggtggatgacattgatggattttcttatgttgaaccatccctgggatgaagcctacttgatcgtggtggatgatttctccgatgtgttcttggattctatttgccagtattttattgagaatttttgcatcaatgttcatgagggatattggtctgtagttctctttcttagttgtgtctttgtgtggcttgggtatcaaggttatggaagcctcataaaaagcgtttggcaatgacccttctgcttctagtgtgtggaatgctttacggagaattggtattagctgtttcttgaatttctggtagaattctgcactgaagccttcttgggctttttttttttttttttggttgggaaacatctgatgactgcttctatttcattaggggtaataggtctatttaagttgcttatctgttcttgatttaattttggtnnnnnnnnnnnnnnnnnnnnnnnnnnnnnnnnnnnnnnnnnnnnnnnnnnnnnnnnnnnnnnnnnnnnnnnnnnnnnnnnnnnnnnnnnnnnnnnnnnnnnnnnnnnnnnnnnnnnnnnnnnnnnnnnnnnnnnnnnnnttgtttattctctgctgtttggtaagtttggataaaggtttgtctatcttgttgattttctcaaagaaccaacttgttatattgattctttgtattgttctcctagtttccattttattgatttcagccctcaatttgattatttcctggcgtctgctcctctggggtgtattggcttctttgttttttaaagctttcagctgtgctgttaattctctagtgtgattattcttctgtttcttcatgtgggcacttagcactatgaactttcctcttagcactactttcaaagtgtcccctaggtttgggtatgttgtgtccgaattctcattgaattctaggaaatctttaatttctttttttatttcttcctcaatccaggaattgtgcaattgggtgttacttaatttccatgagtttgtagtttttctgtagttcatgttgttgttgaattctaattttaaagcatggtggtctgataagacacagggggttacttcaattttttgtacttgttgaggtttgctatgttgccaagtttgtggttgattttacagaacgttccatgtggtgctgagaagtaggtaaattgttttgtatttggatgacatgttctatagatatctgttaagtccaattgtgccataacttctattagttcctttgtttctttgttaagtttcaatctgatgttcctgtccagtggtgagagtggggtgttgaaatctcccactataagtgtgtgcagttttatgtgtgagttgagttttagtaatgtttcttttacaaacatggatgcctttgtatttggggcataaatgttcagaattgagacttcatcctgatggatttctcctgtgatgagtaggaaatgaccttcttcatctcttttgattgattttagtttaaagtccaatttgttggatattaggatattacccctgcttgtttcttggatccatttgattggaaaatctttccccaacctttaattcttaggtaccatctgtttttgaggtggaggtgagtttcttgtaagaagcagaaggaaggattctgtcttcttatccattnnnnnnnnnnnnnnnnnnnnngctttgctgggtatagtagtctaggctggcatccatggtctcttagtgtaggtagaatatctatccaggaccttctggctttcagagtttacatggaaaagtcagatgtaattctgataggtttgccattataagttacttgaccttttttctttgctactcttaatattttctctttattctgcatgtttggcgttttgattattatgtggtgaggagaccttttttttttttttggttgagtctatttggtgttcttaggcttcttgtattttcattggcatgtctttctttaggttgggaaagttttcttctatgatcttgttgaatatattttctgtgcctttgagttgggtttcttcaccttcttctatacctagtattcttaggtttggtcttttcatggtatcccatatttcctggatattttttgttnnnnnnnnnnnnnnnnnnnnnnnnnnnnnnnnnnnnnnnnnnnnnnnnnnnnnnnnnnnnnnnnnnnnnnnnnnnnnnnnnnnnnnnnnnnnnnnnnnnnnnnnnnnnnnnnnnnnnnnnnnnnnnnnnnnnnnnnnnnnnnnnnnnnnnnnnnnnnnnnnnnnnnnnnnnnnnnnnnnnnnnnnnnnnnnnnnnnnnnnnnnnnnnnnnnnnnnnnnnnactgtttccttgagagatttgttgatattttgcattttttgttttgttttttctttccttttttcattcctttaagggattttctcatgtcctctatcattttcatgaagatgtttttaaggtcattctcttctgcttcatctgcattgtgatgttcaagtcttgctggtgtatggttcctagtctccagtgatgtcatattgggttttctgttgttggatgtgcttttacattgacctcttctcatcctttcttctggtgggtgtaccaggagtctctttctctcctggtgggtatgggaccaaagttcccttctggtagatgcaaacagttccaatactctgatgtctgtcctcttgttgtggattgaggtggcactgttacaggggccttggcagtgtctgggtgtgttagatcccactgctgagttcggatccagtcagcagacccctggagtcaggcacctctgagcagggtcgctgaaccggaactggaaaccacccctggcccacccgcccattggatggaggcggaactgtcactgcggccttggcagtgtccatgtgtgttggatcctgccgcggagctcggggagcaaacccctggcgtcaggtgcctccgatggggccgtcctttgatgctgatgactgagaactcttcctgacttttcagccccagcctgttttgttcgcacttaaaaaacaacactgttttcattattatctgatcatttctgggagaaaatatgaagtggttacttaatgtgcttgaatggctagctctaattcaacacaacaccctccctgtcaatatcccttcccctcccgaagcacagttcagacaccaggaaggatgagatcacatcacacaattattttgtaacttaccactaataatttattaattaaaagagtaatcaaaagcagattggctggctaataaaagccattctggttttcatttaatgaaaagtggggaggagaagatggtcaagagattgggcagtggtagactatatatagaaacacagacacacacagaggcaggttggaccagggaagggtaaggttgttgtatattaccattcctatggtaaggtggctggaggccattcttaacacatgtccttctgtgaattatggaacttcttcatttgacccaaggatatacttaatataggtatatggataggtactatgcatatgtgtggctgatgtttgtacttgtatgtacatatgcagatgctcacatatttcttctgcagatatgtgtatataacggtgcatatgcagaaatgcatgtggaggccaaggattgacgtcagatgccttcttccattactcaccttgcaaattgaggcagggtctcctgctgaacctggagctcaccaatagtaagctaggcagactagatggctctggggattccttgtggagggattacaggctggtcaccatgcttgcctggcctccacatgggttccagggatccagactctggtcctcataacttgcaaggcaagcactttaccaagtaagccatctccagctccatttaacagtgataatagcatgcatgcggatctactgtcatgtcccaccaggctccacatttttaactttcttttttcctttcctttttagtgatttctggaaaacactccagtagcagtccccaccttccggatatttctcttcccttgaaatcttcccttttgtctcacatcaggctgacactgcttctcaggaggagggttcccattagctattgcttagttcatcttttttcttcaccactgagcactcctctttgtgtactgactcactttggggaaagcagaacatctttcttagaaaaatgagtcctaggcttaggaagatgtatttccgagaaagagagaatctacaagcattagtgctcaggttcccaaaccataagtttttatctttggttctcatttgatttttctatctttatttgtgcaacaaggatgcatttcctatcattacataggaaaatgggtgttaggcatggttagaaccttctctttcatcttagaacagaaaatacatttaattgttattactattgcatctttaatgattattaaacactaattgcttccttgaagttatcttcattgacttaagatctggtgtgcctctgccttccaaggtaaggtgagccagggtgaggctggcgcttggctcctcttcttacccttggcgaacatcatttgaaaacattcactattaaattttcaggaagggggctgtaaagacagctcagtggttacgagtacatactgttcttggagaggacccaagtttagttctcagcacctatgtcaagtggttcatatttgcctgtgactccagctcaaggggttcctacacttcttgtctccacaggcacttgtacacacacacacacatacacacacacacacacacacacacacacacacacacacacacacacagataaatatatattttaactagggtggattgagcctcagctaaggtttcagtgtagccagaagttctcctgagagcagattctcaaaatccaggcagcttgcacatctgtttaactcaagaatttccttcaccatcttagaccttccagtatcactccttcaaaaacaacttgagatcctctctcactgggtcctccctgctcctcattgggaatgatgtcaagatgaagagaaaacaagacacagcaacagtcttgcttagctaagaaagtccatcactgtccactgctactcaaatcagatcttacaagagcaagggtctcaaggggctaaagaattcttgagaaactccctttaccagagcatgcgactaagaaccagcactcattaataggatccctacactttctcagactcagcaatcacaagagagcttgtggtctactgtacagcactgcattattgtccaacaaatcaatttcttttttcatggaaggttctttagttggcctgcctttgcccttcccccatgagggaccgagttcaggagtagatatgcagcgtgtgtgtgtgtgtgtgtgtgtgtgtgtgtgtgtgtgtgtgtgtgtgtacacgcgcgcacgcgcacccaggacacagtcttgttcccaccctacattgtttgttgaaataaatatggaaatcaggctgagcaagccagccaagccagccaaactgaaataaattcatcactcatggattctcaagggagggcaatggtgcatttttttctaaatgattatttctgaagcactgaaggaatggctatatcactaatgaggcctgtacgccatgactgctgattataaatgacccgcaaagagacaaggagatggtgggtatggagacacacatgggaggagtggaggaagcaactgtaagtggaggctgctgccaccggggccaagccaaggagatgcacccagaatgcactctctgttttcctaatcccaatcaccactccagaacagcatgtgactgattctgtgtgaattcaggtgaatggaaagttttcaaatgcctctcaagatagcaaagcagctcatggttatgttctcaaggtaccatcggctgcttctgtctgtgcatagaagttcttagcagtaaagacgatctgcagaagatctaatggggactcaagggacacaaaccataagatgacactaagtggtggctgtttccccactagggactgtctcttgatagctgtgaactgggaatatagggcatgaaggtgtggaaagaaagtctgttctggcaccagataggaagtgtccacagggcagatggtgacatccaggccaggcagacgacaatggactcacaaactaggaatgtcaatgcttggtctgagaaagccctgagtgatctcaacaaaactctgagctttgtgactcagcggcagtattatcatggcatgggtgatttaaagccaaagcatctcttagcatgatctggcaagatgttctcagccagtagaaaagatccaccaagggctgaagaaatggctcagcagctaaggtgcttgctgcacagtcatgaggatctgagttcaaatccccagaacgcatgtaaagagtcgggtgtctcagtaacaagcatctgtatttccagagcttctatgatgaggtgggaggtagagacaagagaaagcttaagtccagctagtctggcatatgcaacagtgaacaagagacccccatctcaaacaaagtggaagatgaagactgacacccaaggttgttctctcattgctacatgtgtgctgtggcatgtccatgctgcatagctgcacacacacacgcacacacacacacacacacacactgcattgaggccttgaatggctacttttgacaaacaacatggcctagttcttgagagcataagaaccacaaaatatatgctttctgttgctgttgttgtttgacatggttctgctatgtagcccagtctagtgtggtatcccttatgtagtccaacatgatttgtgatgatttttctacccctgcctctcaaatgtatctgtgagcttttaaataagaaaagtgcaatttaaaatgagtgcatcacttattccaattgcttaccctaatggtgacacccttacagaaagtacaggtggaagaaaagaaccttctccgacctgtcatgctgggacactgaggcaaggcgtgagatatatatcagagactgtgatggatccagacctcctgagcttatagaagatgtttgctctgtttgcccagttcgtgccttcctgtaacatccaaataagattccagaaatagcttttcatatgtcccatgcatacttcagcatgcacatccgtacacgcagagtcacccgccactcacagactaagagggaagcctgcacatcagctctttctgcaaaatacccaagctgttctaggatacctgcaaccagtcacggtgatcttaaaatgagccaaggattctggctgagcaccttcaatttcctaaataacaacactagacacaacacgaggcttcaagcatgatggaggaaagtgtgttcaccaaatttgttaagacagtcttcataaaacagggaggagggaggaggagacagaggactaattataaacttgcactcagtttacttctgcttctcagcctggctgccattgcaagaaagacacgtgctgtgttagcgccctccctgcagccctccaggcaacaaagagccacatggcagcttggagaaaagcaacaaacagcaggccctagccttcttattcttcatcactggggtgaatgctatgctccgatctgtctttctctctcatcttctccacctagggtcaaagaacaaacagggctctccaataatctaacaaagaaaagaatcaaaagtcacccaacccaagatgcaagctctgagccttgctgcttccagagaggggcagagagggggcagaatgattcccaccagatgctgcctcactcctgtgcagtgttctctaatgactcttaccccggctgtcattcttaaagggtgcagcagcatgctagtgtaaacagctaaacccagtgtcatgtcaagtggtaacaaggccactgctggttgtttatttatttatttatttatttatttatttatttttacaagcaccatgcacttagcagataaaaacgagcatcctatcgctggcttccacaagtcacacttatcaaccgtgaaaaaaaaataaaacaatgcttttgtttgacaggtgttgctcggtgcccgtggtaggaagttcatttttttttcccaggctgcccattagcatcatgaaaaggcgagtaacagctgcattcacagggtctttctgcatgtgtccactggtgagcacagcagagcatcctgatgtcccctccaataaagagaactaattaccctccaccgtaccacctgggcttgagacaagctgtgtcaggaaagggctttgacaaacacatttatttgtccaggaccaaggccagggccagcaaccgccattcttcctgatatcagaagggagccagatgcacacaggatcaataaaaggttcagagttcactgagggctcagggcagtacctgcagacaaggcatctcctgggagacaggacatgggcttccaacatggaggcagtggtgacgcaatgcaagtctgcatagagagtagcctggcgtgtacaccaggatgctgtactggttgaagttcttttcaaagaaagctgaaatatttgaaagttgtcaaagagaagtgggtgttgaagagggaaaaatgttgttttctttatgctaaagtagttgatttatagaataatggtgagtggcatgctgatgaacatgtgttgacatgagtatggttgttttatacacagggaaactgcacgtgagtgaggtgaacaaatgtatcacatacaaaaaaaggcagagaactcaagtttcctaaatagccccccccatgcattttcctaggaaggagatagatacacacacacacacacacacacacacacacacacacacacagagagagagagagagagagagagagagagagagagagagagcttaaaaagactcatgaactcaaaggaccaggatccttctgacttcagtgctcatctgattctaacctgctcaatgccacaggatttagtgactaaggtgaccaaagtggctttcttcagctgctgggcatgtaggaagctcttaggaaccctatgttccaggcccatttgtgaagtttcaatgtggcaaacaagcgagtctctgtctattagttgcaattctccctttaattttctttccctctgaagggaaggtaggaaggattaaaccttcaattactgataactgcccccatcccaagctctgtgtatacctatttgacagtgcagctttgattattgcctagtccctccctgcccaatgccttagcctactgtccagctcagtcagcaacagaaagaacattccatcagtcttctgccaaagatgagtatgcaattaggacatgtttcctctctggggatataggctcacatttaacaactcacctgggctgctgagatggcccagtttgcaaaatgcttgccacacaaggacaaggactcaagttcaaccccagcattcacataaagacaaacaaatcaaaaacaggcccagtggcacttcttagtattggaggatctccggagcccactggccagtcagactagtcaaaatggtgacctgtgagatactctattggaaaaaacgaggtcgacatctcccgaggaatgacacctggatttgacctttgacctccataagcttgtgcacacacagaattcaccacacaataattttactcaccataaaattcaattcaagaattatgaactaaaatgccaaattatacagccatcagctcctaattatccatgcatctgaacaatgcaaaaataagacctcaaacccgattaaaattcaggataatttcatccagcccattttgtaatcttctcagctcacaagtcatttgttggaagtttatagactacctattcacagagacagctaattatacgcagttaaagcaagtcctagaagtcagttctaagctgaggcaccttcactcttttgagacttgtcgtgaactagttactagtaacaggcaaattattactgccctgcttggccggtcctgtccacatctgtagtccagcttaggcttcaaaacaatgggcatcacttcatctcctgaactttctcgactggggcttgatgaagtgatgtcctgtgggtggcatcacagccatggagaaaaacaccacccaccaaagggaaaagctttgcccacgggacccctgggaggagccatttcctcttctggtgttccgcactgacatttttaaattataatgactccatatcccaaatgagtactaagaacattctgaatcagctaattaataaatcaattgctcttcaggatggcatttatcaaattcacaactaatatgagagatgagattagagtggaagacggcagctgctcttccactgcttctagtaggaccatgcttgagttctagcagggcccacaaccttagccctacgatgtctacatgcaaagcatgtccatgctacctggggtccaagttcagtgtcagagccattttatgaaataacaaatagctgttgaggtctgatgaacagtggtgttcctcttaaccagatcctgagcatccatggagtagtatatgctgagacagcctcatggaggagccaaactaggcaccgatacctagacattggcggttctcacatggtttttaccctgttcatacagcacagagatggcacataagtgccaaggtagacatggagcatgctggtgaattcttcatgcccttaacacctggttcttcttttctaaccttcagaattgctgtcaacacgttcttggtgtgtgtgcatggtgtttttgcgtgggtgcatgtgttcacgagactgtgtaggcacagaaaaccttaacttgggtgttattccttaggtgctgcccaccttttcttttttttttttcttcacttccactgcaccaccctctcccagatacagtctttcattgacctggaattcaacatgtaggtgggtttggctagcaggccagtcagtcccaaggacttgtgtatctctgcaccggtataacaagtatgtgtcacatgcctgccattttttttaaaggtgattctgaggcttacatgcaagtccttgtacagtcaagcattttaccaactgagcccagtgtgcactgctcttaactgtctacatagtgactccttctcagacaaaacatcacaaccacatgtcgttagggggctggtattgacagtgtgggctagacaaaggaatagtggcaaaatcccaaatgcgttattcatcaataatggaatgacatagaactagactagaaggggagagagagagaaagagagagagagagagagagagagagagagagagagagagagaggtccactgcttggagaccaatgggctaagcaaaggctcattattggttgaggcctagtctgcctcacactgatcacccccactccttctttatatcatcagtacgtttttctcctggaggagactttttgccttgtggagagagataatgggccttgactttgcagtcaaatagttactcaagcctaatggctctgcaaattacttagacagaatctaatctggagtgtagatatcgagggtataatgtgtgtgtggggaatcagaaacggcacattgtcctacagagtgggcataccaaaggactcgagaagagaggatggtgacagagggagacagaaccaggtacgtgactgtactagagtacagagtgggtgtcccagcgctgtgatggaaacaatgtgaaaagagagccagaagtccaccaatgcaagtggctgagggatgagcatcacaaatgtgtggccagcttgggatacatataagaccctcaaaaaaaggtagggacaatggaaagatagttcagttggcaaaatgcttaccatgcaggcgtaacacctatacacataaaaacaaatgtttaaaaataaaaataaagtaggacctagagaggtgtcctagtgcataagagtacttgctgagtaagaaggaggacctacgttgggaggacagcgctcatgtaaaaggctgggtgtgtcctcacgagcctgtagcctatgggctgtgtggagaccagatgggagaatctttggggcttgttggtcaccagctcagctccagtttagtgagaaattctgtggagaatgatagagcaggacacaatgctcttctctggctctacatatgtacacctgcacactcatgcgcacacatccctcccaacacacacacacacacacacacacacacacacacacacaaacacaccacacacacacacacacacacacacacacacacacacacacacgaatgaaaacaaaggaagcaatttttacccaaagtcagggtgtctgaatcaggccacatttacagagacactcagaagtcaagggtagaaaagtttagtgcaaagaaatcatatttatccactctcctcacgactgtttagagatcttataacagacactatctggagttaggctggctggagaccaaggtgaagcaggaagctacttggcatgagtcattacccattcattgttgtggattttaaccaggctcttctcacagcattttctaggactggatttcttgtttgtttgtttggagacaaggagaggtgtgtgtgtgtgtgtgtgtaacattggctgttctggaactcactcaggctaatctagaactcagagatctacctgcctctgtttcccgagtgcctggattaaaggtgtgtgccaccatggcctggctagggctagattttgtatttcttcttctgtaaaatctatggtgggtggcagataatagttttgcaaataacctcatctccttatgcttcacattatgctaattctgagatacaaactgaataaatacacaggtcatttccaaaatgatttttatttgcttgacagattgaatctgtgcacttgtaaaagtacagttggttaagtaaatcttgaggcagaggcaggtttagcagggcagtgttgctctttaaccccttcatctagaaggcattttttagggtgtgaggaaaccccaacatctctatcaacagagatgtcacagagctcaaaatgctccaagcactttctcacagttatttagaagacttgacagtgacgaaaagttggggagctggagtgtgtttccctccattctaaagatgactatttgtgcaagcctgcttgatcatttgatgctttaatttccctacctacatgttgccaggaaccttgccaacaacatcagggactgtaataagccagggcaacacggtatttttagtttatctgccaaactctcaccaaactaagattttatttttttggttgggagactcttgatgactgctcctatttcatttggggttataggtctgtttaaattgcttatctgtttttgatttaatttttgtaactgataactatccagaaaattgtccatttcctttagattattgaattttgtggagtacacgttttcaaagaatgacctgacgattctctggatttcctcagtgtccgttgttatgtcccccttttcatttctgattttgttaatttgcatgttcactcactctctgccttttggttagtttggataaaggtttgtctatcttgttgattttgtcgaagaaccaactccttgttacgttgattctttgtattgttttcttagtttgtactttattgatttcagctcacaatttgattatttcctggcatctactcctccggggtgagtttgcttccttttgttctagagctttcagttgtgctgctaattctctagtgtgactattctttagtttcttcatgtggacatttagtgctatgaactttcctcttggcactgctttcaaagtgtcccataagtttgagtatgttgtgtcttcactttcattgaattctaggaagtctttaatttcttccttgacccaggaatgttgcaattatgcactgttcaatttccatgagtttgtagggtttctgcaatttgtcttgttgttgaattctaactttaaagcatggtgatctgataagatatagggggttagtccaatttttttttgtacccattgaggtttgctatgttgctgaatatgtggtcgattttagagaaagttccatgtggcactgagaagtatattcttttgtgtttggatggaatgcccagggccagatagtttcagtgcagaattctatcagaaatccaaagaagagctaataccaatactccttaaattgttccacacaatagaagcagaaggttctatttttacagggctacaattacccaggtacccaagccacacatagacacaactaggacagagaactacagactaatatccctcatgaacattgatgtaaaatgatgtaaaaatactcaataaaatactggcaaattgaatccaagaagacatccaagaaatcatccaccatgatcaagtaggcttcagcccagggaagcagggatggttcaacacatgaaaatccatcaaagtaatccaccatataaacaaactgaaaaagaaaaaccacatgatcatctcgatagatgctgaaaaagcctttgacaaaatccaacatcccttcacgataaaggtcttggagacatcagggataacaggaacatacctaaacataataaaagcgatatataggaaaccaacagtcaacatcaaactaaatgcagagaaacttaatgtgattcctctaaaatcaggaacaagataaggctgttcactctcttcatatctcttcaatattgtagttgaagttctagcttgagcaacaagacaacaaaaggagatcaaggggatacaaattggaaaggaagaagtcaagctttcactgtttgcagatatgatagtttatgtaaaaactctaccagggagctcctacagatgataaacaccttcagcaaagtggcaggatacaagattaactaaaaaaaaaaaaaatcagtagccctactatatacagacaataaatgggcttaaaacaaaaatcagagaaacatcaccctttaaaatagccacaaacaacataaaatatcttggagaatgataactgaacaagttaaagacctgtataacaagaactttgagtcttcacagaaagaaattaaagaaggtaccagaaactggaaagatctcccatgctcttggataggtaggatcaacatagtaaaaacggcaatcttgccaaaagcaatctacagattcaatgcgattcccatcaaaatcccacacaattcttcacataccttgaaagaataatactcaactttatatggaaaaacaaaagacccagactagccaaaaacccaggatagccaaaaatccctgtacaataaaggaacttctggaggcatcacaatccctgacttcaaactctattacagagctatagtcttgaaaacagcttggtattggcacaaaagtagacaggtagaccaatggaatagagttgaaaaaccctgatattaacccacacactttcaaacacctgatttttgacaaaaaagctaaaattaaacaatggaaaaaagaaaccatcttcaacaaatggtgctggcataactggatgctgtcatgtagaagactgcagatagatccatatctgtcaccatgcacaaaatttaagtcaaaatggatcaaagacctcaacataaatccagccaccctgaacctcttagaagagaaaatgagaagtacccttgaacaaattggaacaggagactgcttcctgaacataacaccagtagcacagacactgagattgacaattagtaaatgggacattctgaaactgagaagcttttataaggcaaaggacatagtcaacaagacaaaatagcagtccacagaatgggaaaagatattcaccaatctcacatctgacagagggctgatcatcaaaatatacaatgaactcaggaagctagccaccaaaacacaaaacaatgaaattaaaagttggagtgcagaactaaatagagaattctcaacagaggaatccaaaatggctcaaagacacttgagaaagtgctcaacatccttagctttcccttagccatcagggaaatgcaaatcaaaacaactctgagataccatcttactcctgtcagaatggctaaaatcaaaaacaccaatgacagtttttgctggagaggatgtagagaaaggggaacactcctccactgctggtgggatgtcccgcgtgattgtctcgccagcaagaacaacacaggacattcagatccttttgcagtaaagcttttatgcgtcttgagagagagagcataagcttacagagcggagaccccgagccaagaatcccgtcccctaataaaggctggcaaccgctgccttggacgtgtcaccccatgattggctgcagctcatcggaccatatgacgccatggaaggggcagagatcaaggaatggaaagttacccagcgcctgtgcaataacttgtttacattcggtgcctgccggatgcaggcgccatcttgtaatggagaatgcagggacggctccctacagtgggagtgcaaactcgtacagccactttggaaatcagtatggcggttccacaggaaaatgggaatgagtctaccacaagatccagcaattccaaagcagggtgttggtggtgcacacctttaatcccagcactcaggaggcagaggcaggcgatctctatgagtttgaggccagcctggtttaccgagcgagttccaggataggttccaaaacaatacagagaaaccctgtcttgaaaaaacaaaacaacaacaacaaaaaaaatccagcaattccactcttaggtataagccccaaagatgcacattcgtacaacaaggacatccgttcaactatgttcatagcagcattatttgtaatagccagaacttggaagcaatctagatgcccctaaactgaagaatggaccaagaaaatgtggttcagttacacaatggagtagtactcagtggggaaaaaaacaatggaatcttgaaattcacaggcatatggatggaactagaagaaaccatcctgagtgattacttcactcagtcacaaaaagacaaacatggtatgtactcactcatatatggattttagacatagggcaaaggattatcagcctacaatccacactgccagagaagctagtaaacaaggaagaccctaagagagacatacatggtcccccggagaaagggaaagggaaaagatctcctgagcaaattgggagcatggagggaggggagaggaagttaggagaaagagaaggggagaagaggaggggagaagaaggtatgagggagcaggaagattgagtcaggggaagaatagaggagagcaagaaaagagattacataataagtttaaagagaaatctggcactagggaaatgtccagagatctacaaggatgactccaactaacaatctaagtaacagtgaagaggctaccttaaatgctcttccccaataatgagattgatgactaccttatatgccatccaagagccttcatccagtagctgatggaagcagaagcagatacacacacctaaaaacactgagctgaactctggaatccagctgcagagagggaggagtgatgagcaaagggatcaagaccaggctggagaaacccacagcaacagctggcctgaacaaggggttgctcacagaccccatactgatatctgggaaatcagcataggaccaacccagacccccacccccaaatgtgggtgtcagttaggaggcctgggcaatctatggggcctctggcagtggatcagtatttatcttcagtataggaatggactttgccagcccatttcacatagagggatactctctcagcctagatacacagagggagggcctaggccctgctccagatgatgtgacagactttgtaatccaccatagaaggcctcaccctccctggggagcagaaagagtatgggacaggggaggaggggagggagggggacctgggattgacatgtaaaacaagcttgtttctaatttaaattaaaaagaaggaaaaaaagatttcattttttctttttaattatttattttgtctgtaagggagttgaaggaagaaatgatctactaggaatagatttaaatagtatttcccatttaaacatgtattttaaaaagaggcactgggttctatgacgtttggtagcaaatggagtttctccctgcagcctttgtgatttcatttgtgtgtgcctgtaggcaagcaagcagaggcagagcaggatggcaggtgtttctctctagagcggaccctattattgccttgagatgggatcttttagaggactgaaagcttggctttctggccaggctggctgtccagtaagtgctggggaatctacctatcttccctcttcccccaagcattggggctccaggcatgcacagccatgtacagtcttttatgtgggagtcagggattccaattcaggtcctactctcaccctctgagtcatctcttcagccccaattcgtctgaaaaacatagccgcctgcatctttgtttctggcctcctccatacctgaaaatacttactgctcactgttatcgagagatcctgtaatctagaaaatcaagatgattcattctgacattttggggaaaaccctggatgggttttccatgccccactcagctctttgataagtatagtggctggggggtagggacaccgaagtggtataatgagactggatggctctgctctttttcacatcgttccaggagattttcacagttcacactgaggattttctgaatctatgaaaaggcaggccagagacagaataatgggattgagctgtttctgacttgcaaatggtacacactacaccactccaagaatcctgccccctcccttcctctttcctccatcatttagggtgtgtgaaattgcaacattaaagaaacacgcatgctgttcttcccttctgggtcagtatgggctgctgctagttgtggcaaaagtgaagagtggggcacagagggcagggtttctaggcaagttcactcgttgattcagtctactgcgtaaatcatgaaagcagtttgcagtgggttctacaacagtcccaggtgcaaatttcacatgcatttccaggtcacagggagctatctccggaacaggattttgagtctacataccaagccttttaactgtgatttagggagctggaaacagattaagacacagtgcagtggctggaagatgactgcatgggcgaacacaacaattaaacacaggagtagccttcaaagatgcttctagccatgtcctgctactgatgaccaaactcacagtaatggagggatacagtcttagtgactgggactgtctatgatgcttccattgctgtgagacatttggctgaaaagctaagctaagttcttcttggaggaatgagtaactaggcagcaaggtctctcacaaagcaaggggcctcatcatctagcagcctgttggcatgggacttgagaaatggaattcagggtagtttgtttgtctatttgtttatttgataggatggttgatttgggcaggggagtatggtagcattttctaatcttatccatttgatctaatttcctcttaagcataaatgttagtaaattatatattgtaagtgaccctggggtgtgcaatcccttttcttttaatacacttttccattccgacaaggagcttcagtggcttggaataatcctcttcaattgacaaaggaagccccaatttctaagtttttaaaccattagtggctgatcagttgtaacaaatacggcaccactactgctgctgcacctaatgattgaattttaaatattcatgatggatggctgtctgtgtgtgcacacggaaatgacagcttcgacggctgcttctcaccagggcaccgttacagcacaggcagaagctgcatatgtcagatattttttttttctggctaaatattccagccattaaaaaaattattctatcatatagatacagcagcattagcgtgtgagatctatgcatctacacatacaacaatgcagaaatggaaaggacccattcttactgcctccctctgaaccccaaatggccttttaatgactgagagaaagcactgagcggaccagcaatcctggaagtggctactttggcgtactgtgattttcagtgatttaaattttcataattttacttatttgcattaaaaatcctctactaaacaacacattataataagataaaagttcattaaaaaatcccaagctaagcaaaatcacaatgtcataatcaaattctgacccaattgaaagattttgggaaattgtactcacaatttatagttattatggaaagatagtaagctgtatctaacttttagctctgaggctataagtgaggtttttatttttctttaagacaattagtttttggaagaattcaatagaggatatagtaattagaaaagggagatgtaaaatatgtgtatgttgcaaactatattatagcaaatgtatctttggttactatttgtggtccagattataaagaagtaagaaaaattacccaagtttcagactgagggggagcccctagtctcatttttcccttgtctttccttcttagcaattcctacggccccttcacagcctcctccagcaatgttcttctggatatttatatgaaacactgtggccagtgctgtttctagattgtatattcagaccatctgattttcaaatggattcatggttaacagtatatatggccatcctgaccacagaaaaggagttgtgaagaggggaagaacaacacagatatcgtagagagcaaaactacacacactaaaactgctctatctgtcgagctttcaagaccagtaattaagtggttaagaggaaaacagtataaattgcttgcctatgatcagttcctggggttccctgcagaaaaggattagggtaaaatacattgaaaggaaggttcagcctctataacatagatgtggaaaatcagacaagatctgaccccacagctgacccttaggtacactatgggtatgggctgggcttgtatcaagtgtttgttcaaggtaaaaaggagcaaagcaaagttgggaatgatgaagaaaaaaggagctccctggagaaaaaaacccaacaacttcaaaccttgaatgtgaaactttgtaatgctttgtaatgctgtggcgcctgcctactacacaagcccaaactactagtcaacccaaatgaaactgtcatttgttacattggctccatcttatcaaaagagcccttaatgctgcatttgtgtttcagagtatttcctggaaatgtcacatgaaattcagaagaatcatttttcctttaattgttaccatttccaataatatttgttcttgtttcataaaacacacatcccatgacttacatctgatttataagcaaattacattgatatggctaatcatctctttagtctgcttaatattttcacttgtctaatagcaaattttatttacattgcgtatgtccctcctcgactcaatttgtggctagctggttatgccatacctggaactagattaacacaaataaaatttaaaaaataaagtggtcttttatgaaatctaagctctatagaattctgtataaaagagttatatgaacatttaaatgatagcaaaatagtttcaagacaacttcaagtcattactgtcttagcatctggctaggctcactgtgtaattaaagcacccagatgtcctgacttgtcaaaagaatccttaatactgtagttgttctggtgaaccctttagttaaggaccccttacatcctcaaaggtgtcctggtttggatcatacatccaatgttttggccgtgactttctactagttcataagggctaagctgggtttccaacatgtagtactaagggactcctcaaccttccatgttttctttgcttcaaaacagactaatgacaatagagcttcaagtgtgtgtgggggggtagagagagagagagagagagagagagagagagagagagagaaacacagagagaaacagagagaaacacagagaatgctaaaggctaatgtcagatgtcatcagtttctctccaccttatttttgagacaggttttctctctgagcctggaacttactgattaagctagactgtctggctggtgagctttgttttctgccttcctcagtgctggggttacagacctgatccctggagtcaggatttgacgtgggtgctaggtatccaaactcacatgttgtgggatgttgtacactgtgggaagatatgttgctgtgattggtttaataaagagctgaacagccaatttctaggtaggaggtagaggtggaacttctgggcagagagagagaggaagtaggagatgaatctagatgcctgggagacactgaagaggtcacacacattgtacagagtaggcgtaactgagccacatgacagaatgtagattaatagatgcaggttaatttaagttataagagctagttggggacaagcctaagctaaaggccaagctttcataatcaacaagaagtctccgtgccattatttgggagctggctggcaggacagagaaagactcattacactcaagtttttatggctatgtggcactttagcaactgagccatctccccagtgcctgagagcatagcctgtgaggtgcatacaggcctctgttagaaatgaaggaagactattttgcaagataaagagagcactctaccaaagcatgaggtatgactggcctgatcattcagctttgattacaataaatgtcccaaacttatgctaaccctcatgttcttgtggtccagggaagggcacatggtgagagacaggatgctcccagagccctgccaggcctacagaatcaatgatgctaaatgacagattatacaaaacgatgtcttccatggtccatgtcaccatcagagacattttcatggacaagcccatgtagaagtctcactgtccaggagtagcaactgaagaggactaaaccagagtcctcaggtcaagaaatttgtgtctcaagggatcacagtgcaatgtcacttagaacaaatgcttttgagagatagaggcaactcttgtgctgcatgttggtggggacgtgggttacctggggggtttatctagatgacagctgtcacataagttattctggtaggacatcctgctgtgttgctggctctaacctaggtagggaatcatagacttaccctaggacatatggttgtggttctaaatctccatccacagccttctaacatttgctaagtcatctatgtgctctcgcccagaagaaagggaaatcaagcttacttaatcactaacccccatctacgttcaatttaaatcaatggatctgagctggaagctgtgcatctcaggggcctttaccactagagatgggcacactgagatgtctgaggtttccaaaagagctgcttgaggatgagcagggtgcagctggagcaggtgttatatattaagtgatcctgttctctttctatttgaatatgaacttcttcctatgctacatgctggtaggtaataaatctcaggacctgacacctctggaggtctgggcgaacgaagctacttcaagataaaaaatatttcaggcaaagagatgaaaggatgtcagaacaaaaagtttatcaatgtatatgttagagaaaagaaatctgtcccagcaaaatggcttcaggaatgttttacagtgagagtcatttccaaaaggcccctcttcattctctttcttttttacaacacacacaccaggcttatcagcctgggcacacatctgcagccatagcagccactcatccttccgtacgattacttgaagcaccagagatttaacaaagaaggaaaaataatcaaaacatgatgtttcttagcgctagaatgttgtgtttttgtggctgcctttgtaaagtgtgcttatgcacaggatcgtctctttgtcccactcttccacagtttctatcattcagagagactggctcaggttggtggagaaggaattactagttttaattttcatctggcagtaaaaatttttatgaggccataggaatacaaaataaactcataatgagaaaaataattataggtttcttcatataagatccttataaaaaatggttatatcccaaatgtaggctcaggaaactctgagtcacccagtagggctgtttacattatactccttctgagggcgtggccaggttctgtctctgccaggctgtttgctggggaactccagaggctcaggcctctttcagaatcagttcatgcaggcagcactgcccccaagcatctgcttggggcaaccccatgcctttctttacttccagataggagttcagtatatgtgtgatgagtggaaaaaagaagagcagacgaagcagccaaatgtattcggaacaaagtgtatgtgtgctgcaaactggaagcctgttggtctagttgcaggctatttattctgaaacagaaaggtgatgaaggctttggccacatgtgaagctcatactcaaatgggctaagagaggagtacaggagggaaggtgcaccctgatggtgaaaccatatctgtaaggatctgcgatgccggaagcctgggtggacctcagctctctcctccagcttagagtccttctgggagggctgagtgagcagggctgctcagtccatttccactgaggagaaagggaatgaatggcttctccctgatgggcatgtagtaaggttgactaaaagtcatctgcccaaatcctgtggagctgcaaagtgggtgagttggagtgagtgacacagaagccatgcaagggcctgcacctttcagaaagcaatcctccacttctacattctggggagaattagggtactctggcaccccatctcacccacccaaaggtagtaaatcaacaatcataacctttactattattgaggaatataatctgtaactcttaataaaccatatctgaacgatgttttataacattaacatacacttaagtcaacaacaaatctaacacacaaagatgaggaaaatcaacagctttctaagtgtggatgtagttctgaattttaaattctagcagggggaaaactgatgaaaaccaccaaaaggaaacagaaatacaacatcaaagggcagggttaatcagcataacaaagtactgtgatttaaacaatacaaaggacctgaagcaaacgggcactacaaacatcagtgacattaccacccaaaagaaagagggcagaaaggcagctttgcctctgcaactggctcactgagggcaagaggctgacagacatttaaaggagattcacgaagatgggcaggggagctgtgattccctgggctgtgggcatccagaaaagatgggggtctcagtttgtgctcatgacttccaacacctgcaaagccaggagacaggcaatgaaggaaggcttgcccctgcacatgatgggggtgttcctacccccatgaaaggtcctacccccatgagcctgaatggaacgacttctcataacagtctcttgctgggccaggcattggtggctcagaactttaatcccagcatttgagaggcagaggtaggtggatctctgtgagtttgaggctaggctggtctacagagcgagtgccaggacaggctccaaagctacacagaggaacctgttctttgaaaaacagaacaacaacaaaaaatagtctcgtgttggtaattaagaaatcaaaacagggctggggagatctcgggtcagctcaaacacaggaacctgagttctgatctgcagaatttatgtgaatagaaggtcaggtgtggtgttgcacccctgtaattccaaggcaggacagtggagatgaggtggacccttggtaactactgtccagccagcctggcaaattccaggcaaaagagactgtctcagacaaaatcatggtgaatagtgactgaggaagacatgtaaggctaacctctggcctcacacacatgaccacacaactgagcacacacacttgcagtctcataaacaggatcagtacacggatggcaagttttcttgctcattgtctcatctaatagtcagccccatgtgtcttcgcaattacagaattgccgagattgaacattaggggacatggaggccacgcatcaattcatcaagtggccatccagcctgtggacctctggtgacaaggtcctcatttcctcctgaacaggttgctaccacccctgagcagctgtgaatattagctcatccttcctgagacagagcccaaatttgtctttctgaaggatccacttttggcccctgggtagaaaataaatctaaaccatctccgatacgagaacctttcatattagaaaatgctattatgcactagcagagtctttgctacttcaggcaaaatacactcaattcctttaaccttccatcacgtgatcttaagtttttcaacttcaccagttactctcctctcagctcagtctggttcttacagctctttactaacagatggtaagggcctccctgtgaggcttactgtatgtttctacgaggctgaacatagtacctgcaacatttcctgcatgaatacaatgcacagcaccttgatacgctgatttcagtgctgagtctcacactgatgctggaacatttatttttggtcagttccaaattacaagtatgttttagatctgtttccccaccatcagtaaactgtattgattccattcagtctcatgtcatatccgactaataaatgtgcccttataactcaatacctgtaattcatacaaatatttgccaggatattactatggctgacttgcctggtgactcttgacgtttctgctgttgttgtaataccaaaggaaatgattgtgtttagtgaaattacaagatttaggtttaaaaaggcagttgttgtcagttggctgaatgctgaatgcatgaattgcacacaagcagtgtgtgcaatcaaaaccactgaaagaagtaccgtgctctgagatgtgaaggtctcaggtggcgcctgtgccgcccgccattttggggtcctgggaaaagagcctatgtagatgctctgcatggtgctcacatgtgctttcctcctttagcagatgctgctctgtgctccccacgtgtcagcaacactgaacatacacaggaagtaacacctgctagactggagaactaaccagtcatggagaaacccagaaaatgagccatgttcaagatggaaagaaaccactgctggaccagaagtaactataacgaaattttgaggatgacaggctcattccagggctgccatcaaggaacaagagcaaaacaacggaaatctggggtgggatattcctcactcttgaacacaagccatggacacaaacctatggatggacacacaccttcatatccactaagatttgggaacacaaaagagtcattttatcccatgaatatgtcatctatctcataaatatttgtgaaaacttctttaaaaatcctcagaactgtgccacttaactggttccaggccagcccccttcagtttctcatttgaatgcatgttttgctttactaagtaaacttctggttaaattgtctgtgtctcttgagtgaattctttcctctgagcagagaagtacgagaaacctctgtaacatgtccactcatgtggttctctacccctgcctgtggtcccttgggctacatgtgatctagctgtgcccagatgtgctgggtgagagtggatttgtcccttaatgattctttatccgggggacaagatctggcaaaggagatgatctgcagtgtaccacacacagatgaatgagtggctggtaagtctgtgcgtgcctatataggaagaggaaagcaggggctccggacaccaaactcttaagtgtcagtgatgatcttacgatgtgaagcaatacagaccgggtggatggcagccatgcagacctgataggggaccagcaaagcagcagatcctgaaagatgagctagaacattgttaggctcactccctggtatgcctgttcctgctcctagccttccattcagaatagctgattactcatagctggcctgttggcttgacctgggctcaacgatcagttcctgaacactgaaagccaacagtctgctttgttcctactgctgctgctggcgtgtttgggagtggggagctggaggaatctcaagcagttcacttctgagctgagagtggatgaggctaagcatggacaggggtgcttttaggacaactgagaactctgggtctagatttgtgccgcaaagcttgactgggtcctcttacttatccctcgaaaatcactcggtgtttttgattctaacaccaactaatttgtgaaatggagacatagtctaatgttgaactaccatcagggttttctgcagctctgcacagtatatttcggcataactggaagtgcctattcttgagctctacaaatagcataacttcaaatgcagcaacaatctttctccatttggctagactgtcgatgagctgttccaatctcacttttctacaaagttatcctttcctttttctctttggagaattaaaattaagcttcccttctgtccttctctagggggcgtgaccaggtggaatgtctgttggtgaatgagtccagggccagcatctagcaggagggggagggtgggaaataagatggtgccagatgaccttggggggaattcattactgtcatccctgcttttagctaccaaaccatcattcttgtgccttcatattccttgccattgaatcacagagccgcctggcctctgtaaaagcacctttccttcattctttaactaaacacaataatagattaaaaggtctaacctctgtagagctgggctggggccttaccttctttccctttctccatttactctcccccaacatcaactgagcactcttgaagtctgtgcctcaatctcccatcctttcttgagttgtgcttcttggagccttgtcctgctggccccacccctgctttagaaaccttgactgactgggcccttttctggccatacttactcctatagtctgcagggtcaaggtaggagacattgtcccacttccagcccatgctctggatacaggaaacccacttccaagttttctccctgaggcctgtcttccggcactggtaacattgctaacccaggatgagatggtgtttgtgatggaccctggaggtgtaggtatgtgtgtctcagtgtgggaggcctctgtggtagagcacagagccagagctgtccagggaagctctgtggtcacacccaggaggcaaacatttcacattcaaagctgccgtctgctggctctctgaaggtatacttgtcaaggactgttagttgagcaaactttaacttggtggggttttagctcaatgtataatgattcaatacaaggtgtatggtatttacactacggctttagcttccataaatgttagggacatgactgtcttaccctgcccctcccccagaaaggttcccacatgtcttctgagtacattactatggattctggtctgtgaggacagaacagtcagggccaggatttttagcccctttcctgtcgcccatctcttcttgctctccctgttcagccactgacaaggcacagtggttaactggtaaacaaggaagagaagtcgctgggtgtccccagagaggttttcatgcgcctgggtgctttcaggtcagcctctgcccagtatggaatccatctgcagcactaaccacagacacacagtgacctctttttcccccgtattgatttttctctcttcatcgctgtattatttcacccctcttttctgaactgtgtttcagacagagggagagactgtgatggaagtcggccaagcaaagacgaagggtgggggagccgctggcaattcccgtttgacgctaatgatttgtgtacaattcaaggtcagagaatgatatgtgaggcttgcgcacccacccacacaagcatacacaatttagtacttgattatatcagcatatagcactaatacatctcataccgcctgttcacttgactctccaattagaaagaaaacgtggagggcagggaccacatgtgaagcttccattgttccccatcacacccaccaccttattaggcacataataggcatttgataaataagttttgttaaaagaggcttgcctctgttaatgaaataaatgtgttcttgaaatgttctgaataaagtgagtttctgtaaatggggatgtgattttaatgacactgggagggttgcaacaggagtatggcaataaatccttctacaaaccaaataaccattacattcggattgttatatgttttttaccgtcttggacctgaaccagggaatccccagttgtgatctgtgagtctttcataactacaaccacatttatttgggggaatgcatgcatacttttttgttgattttccccctgcagcttttattgtattctcaaagagatgtactacttctaactgccacccccccccccacacacacacacatcatctctccatctctgtgtaatctgggctggccttgagttcacggctctcctgctggagtctcccaaagtgctgagattacaggcatgaaccaacacacttggctcaagcaatgtgctacttagaacagaaaaagccataactcatgggcaactgaagtgggtctaggtttcctgaaaattaatgcacaagtaaagagaaaacaatagtcagaactaacatttattgagcgtcttttgcatacgtttgtatgcaaaaggcgctcagtaaaagtatcatatgcagtgtttcctacaaggccaacatttctcattgtaagataaagaaactacagatttacccccagtacatacactgctaccagacactgtgtgtgagatttgaaccaggaatctgctttcaaatctggaatcttttcaacaaaatagtctccaatcttatttaaaataacaagaaggttcatggtaatgagaaatgattaggtttaagactatattgttgtatgtggagctgggaatatgaatgactcagtctataaagtgcttgcagtgtaagcatgatagccgagtttgatgctcagaagccacgtgagaaaagttcaacatacccttgggaggcaggggcaggctgatccctggggcactctggccaacttgcctagcctatttgtgagctgcaggccactgttccatgctgtcaaaacaacaacaaaaccaaaccaaacccagatgaacaaacaagcaaccatgatggggaattggagaaatggttcaggacatgggggaggggaggaagcatgtgccacagaaacataaagacattcccagaatccatacaattgctgggtgggtgtggcagtctgcccacaattccagcactaggaagttagagatggggttctcctaagcatgctggctagcaggactagtcattaggttcagctgagagacactttctcaaagaataatgtggagagtgatcaaaaagactcctgacgttaacctcaggcttctaacacttgaatttgtttttccccaacatacatgtaaacatgcatacctgtgaacataaacatatatggttagaaaaaaaaaaagatgggtggatcctgagcagtgacatctgaggttgtcctttggcctccacatatgcctccacacatgtacacccattcctcctctccagtgagtacattatactcatgtcataagtaagaaggtagacgttaaatacatggaaggtgctgagggtatatctcaagtggcagaatgcttttttggcacactcaaggtcagggatttgatttctgctacaagtacagaagataacttggtacagtctctacatctggctgatgaatggggccagcagctgaatcccagtccttgcgttggccaaggccactgctctctacccttttactgatggaatggcctggcttcctgaagatgcacacatcatcagtgttctgactcttggaaccaacataacaccatgactgccctagaattgaattctttctcttcaaattcctttagagataagtccaatcctccaaacattaacaaaatatttactcctaaggatgtgttaggtagcatatgaacctcaccctgtgtgtatgtgtgtgtgcatgtgtgtaaagtaaccatactttgaaactataatttgggggactgtttctgactggggctatctataaaatcggtgattatgtatttgatctgtgcaaatgtgtgcccttcctatctagacaatcctctagacaatccacttctatacttagcagggtcttggggacaatgctgttgatacctaatatatatagaaagttggctatccaatcactcaggagtcatttgatactaattcattccattccaccatgcacctcaatactacaagagcaaattagtgtgtgaaatgatgctagctcattgagagaaaataatattgaaatttaggctgaacatagaagcctggaagatactttcacccagaagggaaggaaagcccaagtcttgaactgaaagggccctgagttcaaatctctatcctgccatttactagctatatactcctgggggaaagtcacatggcctttctaagccccagctttctggaatacaaaaggagatgacacctatatgatggtgtgagaaaaataaatgaggaaatatataggcttcatgcttaacttcgtgtttaaagatgggatatacaaaacaacgaatggcttgtttctccaaacaggagaaatgatgcaaacaaatttctcttctctgtgagtgagtgctacttctaggtttgaaaagaaactccattcttacagtaaagctacaggaagcaaatgctaaaataagtctcttcctgtgcataggtttatccaaatttccttcccaattttatttattactgttgacattttattgcttaaaataatcttgggtgatcccaggggagacacagaaagggtggggtgctctttcttatatgtcaacactggaataaattgtctcaatctcatgtttgtgtgcaaagcatgcaaggaactggcagatgaagcccttgtggtatgttgcaattctgcctcatgaccattagaataggtaagacaaaactgtaaaaatcttagcttgcagcaaagacaggggtgaatgctggcagcacagcagaaacatgtgattgctcacaagttcctggggacttagctcttgaccagcaagccaatgagacccatggagctgggaaatcaatgttttcgaggccccatggaacttggcttcccaaaatcaatgaattttttgttttgatatgcagtgtccttctgtgaaaatgacaaggaggctgtggcagctttaggatgttgcagacaagaattctttatcttgagggaaagataaatctaggaacctgggaaagaggaatgtgaaaatacctgcttagatccttgccaatgtcaggctagaaagtattaattctcaaacagtcttacattgcttgctccatgaccctaagaattacagagcagaaatacaacagcacccatatgcacactcagccacattctacccaaatccaacagaagataacagtattcattagaaacaaaaggtgagatggtgggaagagtgaagaggaaagatacaggagtcttttttcatctattcattacattttagtggaagggctaactttttaggtgcaagtgggaaactgaggccagtgtggtgctgacaccttcaggtggctttctccagccatcttcctctatgcatgtgcacatacaggcaaaattacatcatgcttctgagctcagatttggattcagaaaccttttctttgggtcctaggtctggagctgactctatggtgttggacagtcttcttaatgcttgatgcccaagtttcaagatcacttgaaaatattggcacagaatatttcagtaatatgttcctcactctctatcagagttccttaacctctgcactgcgggcattttgagtagacaattcttagctgttggagctgtcttatgcgcagttgaataattagtagcacatctgatttctacatactagataccagtagcagtatgtccctgtccctacagtggtgaatatcaaaactaactcctgatagtgttaaatgttcagtgggtgaagaacatggctttggcccaatcaacttctgaaagatgagcataactccatctttctctttgacaaagattttaatgtctactttagaagtgtaagaaatttcataagtacagttatcagggtcttagtttcctcatcatgagaccattattttcaggccctctcttgttctaaattctgtccctgaaaattctattcctatctcatcaagaactcaagataatgaatctccaattaaaaacctatacaagtaatatatgttttactagaaaataccagaaatttagataagcagaaaaaaatgaagcaaaagacaacgaagtcacagaaaataaggaagagaattattacttataattcacctactcagaactaggttttataaaacacatgtatacacagatataaaaaatacacatatgcatacacattcatgcaacatcccaaatatttctcatttgattatcattgatgtcattaattctagcttaacctatatttttactattgttactagtctgtctacacgcatgggcgcacacacacacacacacacacacacacacacttttcttcccatcatatacaatatccttcaaagaataactgctcaaagtgggttagcatagaagcggatgattatggaatccacacccctttcttccttcacagaattttagctttaagtgaataaacgggcaagccaaacagagttgacaattgctcacattggtcagctctccttctccagcaaaggggccatcctcagtgtttcaaatcaaggtgtagaagtcggacggggccctctccctttcatacttaatgctacccatggtcacttcacttttctgtgactttttctttggatctatatccagggtctcatgcagtgcggacctaattattttgttccaggtgtgctgcatcctagcatctctcctgccactcactttgatcaagatagttctcaactccttttggatgcctgaaatggcttctcactgcttcttggatcacaaactagatcttagtaatgtgcgctggaggcttcctcctcctccatgcaagccctcccaggacctccttgtttgcttcactattcatgctttttactctttacaccctacttccgagcccactgctcttccactccccttattgatgaatattccattcaaagttaggtaaatcaaagcccaggactgccatctctcaaacaaggggggaaaaaaagaacataaatgaattatccttctgttgacatttcagttgccagatgtagctaattacctgtcatattaataggacatatttgtgttaaagattatcgatcaattatttatttattttggtttcaaaaccaccaaactaggtgaagtgtgtcaacttcaggtagcaattgtcttgtaacagtctctcccttgcagcctatgcatagacttaatccaaaggagagcttgctttttcccattaagtggtgtacaaaggaagagcccttggattttatcattcaagctcctggatgggatacgcctcagtactccagcatttgcctacatggcaagagctctctgtttgacctctagcaccgaaaaacaaaaaaataatctaatcattgtatctcggataacatgtcactcttgaatataaataggactttgcatgctgctatcattttatgaaatcttttaaatccagcttttaggagaggataaatttcttaagggcaggggccatgctttttgcttcctctgtgacgcttgcagttgctgggaacacagctgggtgtgctgttagtgggtcccgaatgaatgttgctaggtgattcagacttgaagaagaaatgaagagaaaagcccagggctcagaggatttgtttgcatgcattttgctgcgaagaaacacaaatgtggagagaaatgagcatgtggacaactcaggggctttggcccagcaatagtctgaagcaggaagttacaatgcaactaagagccacagctgggctgtggcctggaaaacagaggacaaggggtaaaaacaataaacaccttcaaaaataagaaggcagagggaaggacttttaaagaggaaatggaaaaatcctgtcaataactgacttgggtttagagtgaataagacacaaaggtcctctccagttctgtttcctgctttaaataaaggcaaaggtttcacatttagccatagaattatactctgtactgtgaggcataactttgacaccaggcctgaagctactaaagagaagggatagaaacatagcatgcctgggaggtggtgccatattacttaaaacctagcagtaaggagacagcagcaggaagatatccaaggctgaggccagcctggtctatagagttccaggacatccagggctatacacagaaaccctgtcttgaaaaacaaacaaacaaacaaacacacaacaacaacaaaagaaaggaagaaggaaaggagagagagggagagagagggaggataggagggagaaagaaacggaaggaaggaaggaaggaaggaaggaaggaaggaaggaaggacggacgaatgataggttggttggctggttggcttttatatgtttggaaccagtggctctgctcaaccaagcgagtctgaatgttctcaccactgccagttcaggtctccccttccggaaccctcctttaccaatatcactttatgaaatgtcaaaagccatccgtggcaattatggtgttcacaaatatgttcacaaattcttgacattctcttctgaagagagaatctaatctcccttccctagagagtaactggacttcattattttgctgctaatgaatggaataatgaagaaagtaaagatgtgtgaccttgacacgatcttgtgataggctccatggccttctccttgatctcccttgaattaccctctcagaggaagacatccaccatgtctggagagcagccagggaagtcggtccactctggaagtcactaaagccgctatgctgacacccatttgagggtgttaggatggaagtgatgcttgagccccagtgatgcaaagagatgaactcggtctcagtggcatcatgagtataacctatgtgagctatgagccaagaacccccagccacaatgtctctggattcctccaccccgtgaagctgctagttttaaggataatttgttacacagcaatccataaataagatgttttccaataaagcttttttttgagctttagttttagatgtttaaaaaagaactttaaattgggggggggacccagtgttcattatttaggaacacttgtttacctacttttagtaaatctaaaagtatatatggattgctgccaagactgacaaacagaattcaatccccaggatccacatggttgagggacagaacagacttccatagctatcctgtgaccttgacatatatgccatgacaggtgtgtgtgtgtgtgtgtgtgtgtgcgtgcgcgtgtgcgagtgcgtgacaaaggggggtgacaacacagccactgttttgtggcccacacaaatgatttcagatatttatgatcatatttctcctagaacttttccttcttagtgtgctcagtacccagattatagatataaaacaaatgcctagtgaatgaatgaagcagtctttgaggaacgctgaagcttacacattttctcagagaatttggacagtgtgtagatcataagaagtgattcctacttttctttaaattacacgtgaaaacacacatactgcatgctaagggcctgttgtagtttaaatgtgaaatgtccaccatttggctcatatattaggacatttggtctccgactagtggcactgctttaggagtttgaagaacctgtaggaggtagagcctagaggaaaaagtgcatcactgatccatttcctatctactgtgcctcttggtcggccaagatacaaggaggtgaggggtcgcctctatactcctctccacatgaagctgatggccacaatgccttcccctctaccattagctgtatccctttttaaccatgacgtcataaccctttcttatgttaggcattttgtcacagtagcaggaaaagtaactcacatgggatgtaacactattttaaatgttttacagacacaaggatataactttctaataagactgttactatttctgtgtcctagatggaaacctcaagttcagagagggtctgtaaactgtgcatggtctacaggaccatggtctggtcctactgatgatgaagtgttgtcctacattcagggctagttctgactccacccagtgtccccacccaatcaaggtccttctgccccttgctagaccacaccaggaagttcccaagttgtgagaaggtgggggagtggggaagccctccctttaaaacctgcctcttgtggtttagggaataaactcgtgtttattcacgagtttctctcactagaccaccaatttaacactctgccaactggccaattattccagttcatgtagagctaagcaggttcttctccagctgcacacctttcctgctcaacataattaacaaagctcatcaaaaccctggaaaacaagcccagctcactagcccctctgactgatgtgttaacagggggttggggtgttcccacttcaccatgggatgttatgtttatgtggccctaaggctgctcacaaatggtatgtgttgatgacaggggtatgggccagtgagggctactttacttttcataaagtagccaggtccccagacacacacaggattgtagcaggatctgatcagttctggtaaatgatgatgaccagggctcaagacaggctggggaacgacagattattcccggtggttcagaatgacagcctttaaagggtgatgcagaggcttgcagacagccaacaaaacattttcccgctgcttcacctctgttgccgagcacgcctttctgatcacagagcagatgtttttgttgtggtcctatgtcttgctgtccatcacagtggctgccacccacaggaggctgctgagctcttgaaatgtggctgctctaaacccagtgtgttgtgagtgtaaagaacacatccaaaccccaaggtttgctaagaaaagaatacaacatattgttcacttttacatagattacatgttgaagaaaccgtattttaatatattgtgttaaatgacaatatattaaaatcagttacaacagtttccgttttaccttttgtaacatggccatagacatggctcgcatttgtggcttggactatgtttttattgggtagtggtgttttagaaattgggacatctaaaactgacgcagaactgggagggatgcaaaggccaaatgatttccatgcctctccccagggctttttctgccacactaacgggtgttattgaaatgagtattacccacggccaagtctgctgtgtgctcagatgtgaactgcctcaagttccatgtggccatccttcagccccaaggcatcacaagacaggcttggacttgtgcaggcacacttggtgctgtgcagacccgtaacttactcttcccacacagaccggaaaagcggactgctctgtatttagtggttttttttagggaacagttgtatggccgtaagactgctccctgtgtcgtgagatgattgcaaagggcaataatgtacaaaagagggtacaaaagttgctgccatgaaactgggggcttcacttcccctgcctaggactggttttggatctgggggctctttacagcaaagctgagccttttccttgcatcactgctttacttcctggcactggatgtgcccctggaataacaagccatgaaaacacctagaacctcgttgtgtgaaatggctgacatgcaccacccaaatgcatcttcaaatgggtcagacctaagagcaattagagaatgcaggtttgtggagtgtgcccgaacctctctcaggaaacacactacttatcaatgaggattattagtttggatattcactgaggccactagttactgctcagcagataacaactggtaggaaaacggcaagatcttatgtatggttactaatcaagaataccacactggaaatctctctttgtgtttcatcgtctgagtatgtattttatcaaatgcaacaataggctgtcataacgttcaggcctgctgggtggtggtgatgcacacctttaatcccagcactcaggaggcaggtagatctctgtgaattcaaggccaccctggtctacagagcaattctgggacagccagggctctacagagaaaccctgtcttgaaaaacagaagaagaaaagagaaagagagaaagaaagaagaaggaaggaaggaaggaaggaaggaaggaaggaagggcaggcctgttgaagctgcccaagtagtaggatacagtagaagattattctactttataaaaatagaaaagtttagtagtttctagaaaagcccagaattgctatgaatagttgttcagtatagacatgctactttattttattatttttatttatatgcatgtgcctgagcgcgcgcgcacgcacacgcacacgcgcgcgcgcacacacacacacacacacacacacgcagtggaggccaggcgagggtgctgatctcctggaggtggagttacaggtgattgtggatgctgggaactaaactcagaagcgacttgtaacgcccacagctgtgttcttacttgctaaacaaagagccatctttagggagtacgttcttcaaaacatagacacaatcagttaatataataaaaacaccaggtaaagagaatacatgatactggtgtttattattgttttaaataaggaaaacaaatgctttcataatgctatgaatctatggggggaaaatcaatgcttgtaaagcaaaaaatctaaccacaaaataggagtagctatttgtggctccagtagtacaagctgaaacaaatgctagcagctaacttcacatttgctgcatatgtatcagaacatcaacagatgggaatgttcattggaagaataagataaaagggtgggatggctcatcaggtaatggcactctgtgtcaagcctaatgacccagttcaatacctgggacccacatactgaaaggagagaagccaccccataggtggtcctctgacttccacacatgcagaacacagcatggcatacccaaacatgggcatgccaacaccccccgacacacacatccacatacacacccgatataaatgaatgctaaaaaaaagagtaagaaatgatagcagggttaaatagcaagtgtttcaattgcttttaaagtaaagatacagcttgatatttagattaacatgcaacatgtcattcagaagccatgatattctaatattcagcatatgatcataatcattcacattatttcccttttatttggtcatattttcagtcactgaattgtattagtgatttcctctgactgactttcaacccagtctgcctaatctagctacttttctattgttggggagcaaatccaagaccttgtacattctaggcaagcactaccactgaaatcttctttaaaattctgtcctctgcttattagacagtcttactacatagtccatatttgggcatataactcttttatagccaaggctgtcctcaaactcatggaccttcctgcctcagccttctttaaatatcaatgtccaggtaaatattcttactgcatcgctagaagtagtagaaagagccctaactatctattctcctgtgccagtttcatgcactgtttcctggtgtgaatgctgccctctagcctggctgtgtcctggctacaatctgaattgttctctgaacagttcatttaagaaacatccttttgtttccactagcatgcctgctcacccactcttatccagagcctgctcagcctgggtccatctggaagctgctcccccccatgggactcctgtttgctcaggccatgctgaccactgtgctggccctggcactgcctttgcacacagaattttttgtttgggtttggttttctttctttttgatttaatacaggacctctggaagggtagtcaatactcttaaccactgagccatctctccagcccaatgtttttgtttttctgagacagggtttctctgtgtagaccagggtatcctagaactcgctttgtagaccaggcttgccttgaactcagagattctcctgcctctgctgggattaaatgcgtgcaccatcactgcccagctgcacacaaaatttagtatgttttatttcaacttgacacaaggcagaatcatctgaggaggggccctcagttgagaaaatgcctgatatagacaggccggtaaggcattttcttaatgagtgattgatgggggagggaccaccagtgctgatggttctgagttctataagaaaacagagtggcatcttcatcctcttgcagcagacgggaacaaataaagaatcccacagccagatgatatgcaaagagtgagaaaccttggaacactcagtcctaaacagggtcttgccatcaaattcctacaatcagggctcagggaacccagtggaagaggaggtggaaagaatgcaagcccataggggagggagggcaccaagaaaacaaggccctctaaatcaatctgagccaatctcctatgaactcacagagcctgaggcagcaagcacagggtctgcatgggtctcaccagatggggccctagagaagaagtggacacctgacccaaccctaacccaactgataaccacctgcaaatgaaactttagtttctttcatgtgagtctcactggggaaacaagctactcttaagggtaagctgtaggcccagagtaggtggccaacacaaaatgaactcaatggcgtctctggggattccttgcctcataatgttgtgtcaggctttaaacaaaaattatccctttttaaaattctactttttaatttcttatttatttattttatgtctctctcccctcttccctatcagtcctttgagtagctgttatggctttcagttttgtgtttttatgggattcctgggtgtgccaacaagcgggcctctgcatctatatctgtttcttgtgccctttcggaggctccttcttttccttctgtttatttgttttgtcctactcttctgtgttagtttttttcctattctattctactttatactatatcttattttattattatcccttagatgcctatttgctttctagtgagagatagaaagagggtggctttggatggagggttgtgtgtggagggactggggggagtagtgataaagcataccataatcatgatatattatgtgagaataaattgactttcaataaaagaaaaaatgggaaagaaggaaagaaaaaaagaaagcaggctgagttagccatgaggagcaagtcagtgaacagcatacttccatggcctctgcaccagctcctgcctccaggttcttgcctagtttgaattcttgccttggcttccctaaatggagcgtgattcagaatatgcaagccaaatgcaccatccccccccaacacacaagttgctttttgtcacagtgtctcatcacagcaataataaccctaagacagcaggtgataccttacttaatgcccagcattaatatgggacccactttatcttccagacaggactttctggggctgtacactctggttgacaggatatggacatctctttttagtctattggtcaaattttacaattgtccataattttgttgaactaatgaccagtaggcttctgttagggagcaaagctagacttgctctttgtctgtaactacaaaagatgctcttggagggttctggattggagtccatggtgctgaagaatatagtttgaaatgaagggaacccaagattcaagaggtaaagtgaaactgggcatgtggtccatgtgttatcactttcaaagcctaagaacatctaggaaagttgttcagctgccatacttgatataaccaagcaagcgcatccagagccgtggtcctaccaatacatctgaggagtcttgctgggggatgatatctcaagagggtgccacatacgcctcatgttgcctctgccatgtgtgctttccaccccactgccagcttttatccctgcagatcctggggaaggtatctcagcacacatgaggtcttaagaaaagagaagagccatccagctcttggaggattctaagctttgcaccattcccaatttactctctctgcttcccgtttgtggttcaagatgtgaactcccagctttcctgctaccatgactgtcacctgccaccatgatggactcctatcctcctggaaccacgagcccaagtgaactctttcttctctaagactccttggtcatgatgtcttatcacagcaataggggagtaactaatacactgccataggcaattgtattacacattgaacaatgaagtaaacacaggccactttactgtgttctgctgttatcttatgtaccgtttctccagtatgtaccatttttcattataaaatggcaacagccaggtggtggtgccacacacctttaatctcagcactcaggaggcagaggaaggtggatctctgtgagtttgaggccagcctggtctagaaggagagttccaggacagacgggactgttacacagagaaactctgcctcaaacaaaacaaaacaaaacaaaataaaaatggcatcagagttggtagcagctgtggggggtataaagggtgcactcccaggcctcatcacagatttgctgattacctgccctctcaacatctccctgggtgattcttaggtccataaacgctccagaacgctgcttgatgggctgtaagctctctgagtaaacaggaatcttcttgtcccacagcacctttcaagagcagtctcacagaggaccaattaaaacctcttgctcccacagtatattatacaactaattcctttcccgcacacttcttctctttggctgttttttcttagtctcatattcgcagactctgacagaatgtcaatcaggattttaaaagatcttccaggatgtgtatggaaatgattttattttatccatcaatagaaacctttcccttattatgtggatttttgagcactttcgcctgcctgttccctcagctgggaggcctggattgagccagtgatgaggattctgtcaatactttgcctggcacctgagttaccgggcaccacaagcttagtcggggtcatggaatctaaattgtttccacagtccttgaagtaagtcaatgttttcaagattctataaaaagactctgtgggtataatcatgagatcttaccccaaagtggctggaggatgatgttggcatttctgtcccctttaatatatacattcctgataagaaaacttatgtcccgaatgtcatcctggttttattttgttgcagtgataaaaataccccgccccatagcacagaggtgaggaagggttcatttgacacacagttccaagttatagtccattattgtagggaagtcaaggcaggaatttaatgtgtcacagccacagtcagaagctgagggagagtggacacgtggctctttgcttgcttgcttctcaatgcttagccagctttctctactcttacacactttgggggctcaactcatcaaatgctgccacccacaatgggccaggtcttcctctatcaataaaaaaccaagacaattccccacaggctaatctaacctagacaattcctcaactgaatctcttctcatgagattttaggttattgcaacctgacaatcaaaaactcaccatcacaagggtatcaagtttggttagtgcctgctttgcttcattaatggccaaaacgttggaaacaatcatgcaaattttgctgcaataaatttcagtatcaggcaatatttgatattcaaacagaaaggtgtccaaagccattgcagaagtctagaatgggcttggcattttcaagtgctccagtacagtgtcgatacaggagtaaaattaatataaacattggagaacgaaagggaagagagatggcaagatatgcatagctaggcagtcatgatccaggcgtggtcttgctcatgtcatctcggctttactctgtccagcaaagtgatctgaaaagttgttcaaagtgcctgaaatctcttcgggagaggcaagttcctcctctggctggtattaggaagaggttctgcctttctcctgcccagtgatgagattcccaaggaaattcactagtctgatagccaaagggcacagtatctgtttagatgatccccacagagctgcacagggaaatgggctgaaggtccacaaagtgaagagttaagactcttgcccttccccaaggaaggaaggttcctgactctatagagatggagctatcaggctcaggagccctgagataccaggcatcaaatgaaaacagagggtgtaagtgaaagtttaccagtgcttagagatacaaccctcacggtcagcaacacaaccaccaactccctttcatgctcggtttctagggccagcaatgagcttgggaatctcatctgtccttttcaagggaaagtcacctatggacactgatccagggaacaggctgggctctaacccagttatcccagggcaagtgaactccagtacagtgctatgctcctaaacagacggttaaggaaaagcttgtgacattatagaagcagaatgaacacaaggaagagagtaagcagagagcagaagaaaacctcatttcaaaatgataattagtgttcttgggttataaaggacaagccagagaataagaaggagcttatagaaattgaaaatgtggaaattaaaaatgaagtatttgatatcaaggttgggagacaaagttaaggaaatctaatagaacatgggataagaagacaaagacatggaaaatagaaaagaaatgagaatcagagagcagtcgaggaagttcacaatgcaaaaggagaagttccaaaaagttcaataaaaagaaataaaaggagtgagaaagtatcaaaaatatcttaaaccccagatatattaggaacatacattatcagatgttaaaataaatttcttactaccaaatagcaagggtaggcaagcggcttggtgggtaagagtgtctcctgcccaagcatgagacccagagttcaagtctcagcactgagtaaagtccctgctcaactgcacatgcctatcactccagcactgtgagggcagaggcaggggaacacaggttcagtgagaaaccctgcctcatgtgaataagggggaaagtgatatagcaggacaccacacatcattctttgccccccaagcacccacacacccacagccacaagataaatacatttcatggcatccagcataatgtgggaaagaagccacactaagatcacaaaatcttaaagattcaaaaagccctctgaggtaaggtgtagacacacatcactgggcctctcaatgctgtggatgtcacaggatcaggaagaaatgcctttaaggtagggtgtgtcctaagggttgaaaagggaaaaatgccatacctggggaatcaccaagaaaatgacttagtgaagtcaagtggctgtcttcatggagaggggcggggagggctgctgttgctggtttttgtttgtttgcttgttttactggaagtctgatagcactatctgaactgggtgcatgcgtttcttgggaaaagtaaacacatgtatttaagcaatccgacgaaagaggctcctggcttgtaaagttaaggatgtttaaagagattccccaagatgtctgtgaatactggaggcctgagcttcctgtggagatgctacaggtaacaggtttatactagcagagcttacacatattggaaaaataaaagggaaagtggaaagcatatcgacttatgacacacacagagccgaacacggaacacatgcagataaaacaaacagagctgagtacgattcagcccgtcctttcgctgctaggactagaagttagaagcctcaccttctggaaacctgtatctctgcactcatctgtgcaggaattgtacttgggctctgagttgcctgtgtcctcctttggccagcctggggccgtaggcctttgggttccttctgcatagctgcttccttgttttttgtttgtcagtcccaatggttgagtttgccttcccagcaatctcactggaactccacccctcaaaggtgcccttttaaactgctttgctagtactcctccttgctcttaaaaacacctttttgtcacttgtacccatgcgttctctggggaagcccacaggcagctgaaaacatatctctggcccacatgttgctatttttcatcaaatggtttattaaatggttttagacacggttgggcaatgtgcaaaaaactagctgggggtggaggtcttgttcttgagaaacagcaaaattaggaaattataacaaacaagagcaaagtaagaactggttgcttcatctcagaagtacatattaaaaaaaaaaaagtagatctcaattcagaaggctcagttatgacaactgggtacagaaatgtatttttacaaggtgggaggcacagggaaagagacacaatcaaagaaataacattgggacgcatcctggagaagactggtccaagaactatggtagaaattttggtggtattttcattgctgaagttttagctttttacaggaaaaagaaaagttgttaaaggatggagaaaggatgtactaagaaaacggaagagtattgggaggtgggatggctaaggttatcctggagcaggaatttacaactaatacacaccaactagagaacgatggcatgatggcatgaactcattcaaatgaaagtcaatttgacttaaactgatcctctaaaaagagaaaggatcgacttttgcttttaaaaatagggatttttccctacttaaaaaatactttcctggtggcagaaggaacatacacacatgagagcaatgaaaatacccattcacaatcagataaaaatctgaaatggtgtatttgtagatagaccctcacatgcttctgtaagtatcttgaaacttgtttcaaatgctaggcagttactacttcattaggaagcatctaccattgcctgtctgtgctctgtgctaagaagcatttgttctaatgagcccttgccaggaaagagtctgtccaccctgaaagcacctctgagatggacagtgtttcatgcagatttaatccagacactgcttcagccgactgaaccctttcaaaacacaacccctgtagctaaaggcctcagggacccacttgcaagcattaggaccccaaaggatctctttaaaaaaaccccgtgttccagctacgactgtttctagttatcatacttagaaaggggttagtgtgggtctccgaggacagagaggtatcattgcacccaaatgtctacagaacctgcaagttggaattaatcatctttggttgggctcagaagaaatcctggcctaaaaacagcctgagtagaagcataatttgtattaagattaacaacggatcatttgacagcatgcaatctcatgaacctcctggtgcctctgagctcctacaagcatccttgcacaagcctctatttttgcttgcttctgaacttaaagtgtataaaaggttgcatttccattgacatatatttctatattttaattttatttctatattttaattttgtttccgtatttcaaagatgtttcctactagttcccagttgcagttgatgtaaaatcaagccacacttttatttattcagacaggacttctttagatctagctggcatgtgaagacaagaaatcacagggaagggtgggggttggaaggctgcgaagggtaagaatgaagccatggagctttggcctgtctatacaggctagcaccatctccagccttgtagcatctactaacttcaggggtcggggtagagaatgggggtcataagtgggagccacaaaatgccgagttgcctagtatctacctacaggacactgtctgcatttcacaaggagggcacacagacaacaactgaaagtaaagagacactccccaccccctcacacacacacacaccatgaattcactagcaactcttgctgaaatccagctaaatgtctcagatagggatgccatactcctaagtcatgtggttgagatatctaactgttgctggcaaaatggcaaatgttaaaacattaaacacccctacaagacccgctctccacttcactctgaaaatacaaaaatgctttgatttttaaaggccaagagtccatattttccatcactcatagcctgttaagacagctgatgatttgtcccgaaggtataaaatggcgataggtaggcctgagaacccctgccctcctatcaccctttggctaatgaaccagaagaaaaactatagaggcatgccatgttgggtcatgtgacttctgcagcctgctttcctcacagtgaaaattggacataatttaaaattttcttggctgcagtcaggaataggatgttaggttcctaggtattcaagaattcaaggtttattggaccactctttttccaactctgaggaaaaaaaaaaaaaaaaaccgcacaaggatgtacaggagaggaattctggtggcgatcaggctcccttccaggccaagcctggtacctggtacacacaggacagtctggcacgcgggtaagaacggctcccacagtgtgctatttctcacttacctggctgtgggctggaagcgcagcataggccatgggcggattcatcactcctttctgcttaatgagaagcatgcgtttctggtcctcactcaggtgcgctctgggagcttgcagctgtggtggaggctgctgctgctggggaggctggggctggggctgcggctggggctgcggaggctgctgctgaatgtagggcatcaaggggtttttgttagggttggccatagggggtgtcattctcggactcaagtccgcattaaaatgggtcagaggcttagtgttgccataagtgagcatattgtgctgtttgtttaaggagtttgtacccaagttatttggctgctgactgatcatattcatgtgatttgaagggaggtagttgttcatggtcgtcttctgcaggctattggccattgcaggcactatagtgttttggttgttaaaggcttgggggtacatcattgggctatttggtttttctgcagtaaaagctgctccataaggacttgacggaggtcctaagggagaccaacttgaagtctgatttgagtggggctgctgctgctgctgctgctgctgctgctgctgctgctgctgctgtttnnnnnnnnnntgaagtgttggtgttgtgggtggcgtcatccttgtgctggtgctgcttctgctgctgctgctgctgtttctgctgcatgagtttcgccctctgttgttgctgggcagccatctgtttgagctgctctgctggggacatgtcagagctgggcactgccactgagcctgaccctgaaccagataccgtcaccgagattggattaaggagatagccattgccaggccgagctggggcttgacctggagtatgggcttgcgttggagtttggggggactggacagcacagttagctggtgagctggcagggtttggagccacgggagtattggccacggatggtaaactagtggctgtggatacagtagcaaagggaggaccagaagatgaaggtctggcctggggtgatcccatagagacgtgtgcaaaaggagaatgagaggcatcgctcttcacgctcgcactctcgtgggagagtggggtctccatggttgtctgtgagaattccggatccttcttctcttcaaagtcttcattgaacaggtcctggatgtcgtcttctggaactgtgttggccagttcgtctattagctcctgccactcttggtcattcaggttaatgtcagagaacagcttgttctgattagaaagtgacgtttctgatgtgtctatacaggcagggtcatcaagaggctcctgtttgaggtccttgctctgcaagatagcaaagctatcctccagatccccgcagccattgacagggagtttaatctcagggagcctgccattcttacccagatcttccagaagcccaggagtgtgagcagcgctgttctgcaagggcaaagaaggcttgaggtcaagttggtgacagggtgaagcggaaggcagtggcatgttgttgggcaaattgttgatggcttccatgcctgtgggaagatcctttcggatgcgcttgcttgttggagagaagctcccatcgcaagccccattctgctgctccccattaagtggtgatcgggccccttccagcttccttttcaccgtctcctggagctggaaaagaaatgggagataagatgacttaatctcataccaaactcttaaatattgtgatgtgtgttgttatgaactacctttgtgaggacgcatgttcgtgtgtatacatgagcacctgtgtggaagacaaccttgggcactgtccattctacgttgagacagggtgtctcattggcctggagcacacccacgagctgaggttagcctgtgaggccctgggacctacccacttgctttcttggtgctgggataacaagtggacatgtgcctgaattttttggttgttgttcacaggtttttggaatagaactcagatactatgatgaataacccattaccccctgaactgcatcttaagtgctttagaacacgcaaaaaggaaaggatgcttctagcttcaaaatcaggtgaccccatgatttgaaatctgtgagaaaagtcttcatctaaaagcggggttcagagagccaagagatacgcagggtagaggtcacagggaaaggtcacctgtgagcattttccaaatgagaagaatccatacttgagatgtggactaaaacacctcatacctgaaaaggatatctatccccaatcctcaccacacccccataattgaaaccatcaaggaattaaatcaacaattttttaagaacactaacaatgtcctttttaaaaacgtttgttataaggaactgaaaaaaatacacacagagagattaacatagcattttcccagatccaaagtctacaatggactacagagttaaagcagccaattagaagctgtggaacttgtcactagattttacactttcattatcagtcacatcattatgcacttacccaccacaagaaacagaaaaatcaagaagagagtcaaaactagaaaaaatagttttatatccttttgtgactttacttgaattctgtccctcctcgtctcccaatagtagcctttcctgttcttactatacctatactataggcgcacacacacacgtatatattatagaatagatccccaatgaggaaaaacatgcaatttttttctgagaatggataactctcacttagttttatactttctttgtgtttttaaaaatttattcacttcttatgcacattggggttttgcctgcatgtgtgtctgtgtgagggtgccagatcccctggaactggaattacagacagtcatgagctgccatcggtgtgttgggaatcaaacctgggtccttcggaagagcactcagtgctcttgaccactgagccatctctccagatcaagttttatactttctaagtccatttccctttgtggttcattttttctttagagctagacagtattccattttatgtatgcagcagagtttcattacccacttgtaggttgatggacaactaggttggttccattctcttgccatagtgaccagagcagcaaaaatttcttatgaatatggatttaacacattaccaaatagcaggcaatgaggattaatattaaacatagcccaagacttgaacctatctcttgatttatctcatttgcagcgccatctgatgcttggtgtgtttccatcctcttctgtgagtccacacttggtgagagttcctcttcctcactatcatgtattctttgttgtaaatgatgggattcttccaggtttcttcttaaacgttttttcttctgttcgtttatatgatttcctgggcatctccctctactccaagatccttgaccatcttccctaggctgatggtcacaaacagtgtagccagctccctctctgcagagccccactaatgccaactttctcagacacagtttaggagcgcctagaattcaatacaatgctcatttgttcaccatctcagttacctaggacagaaatgtgagcatcatacactgatatgctcatctcatgtctatccatatcatcactgccccagaccaggggaccatctctagttgacccactctctcccttaactgttcctctattcattgtttagctctctcgtctctactctatttactgtcaccttcttcaaaaagatacattgtcaagtggttcctgcttacaagcctgaagtaatcagactaaaatgtcaactgtcatctttgcatcttcctcctatcctgtccttctccatcctcgctatccttatccagtgtatgtacatcttctatcaattctcctaaaactctttttaaaatttgcttgtgtgtgtgtgtgtgtgtgtgtgtgtgtgtgtgtgtgtgtagtagggatcaaacccagggggccttgcccatgctaggcaagcactgcccatcaagctgcaccccaggcttcttcagcctctgtaagttccctaactatgtcaagcttccttctgtctccaggcaaagcaatgttttctttgcttggaaaaatctccccctctcctcccctttctctggtcagtactccctaaccattcccctttccttggttagcaccccctattccctccctttcctggttagttctcttatccccattatagactttatcataatttgtgccaaaaagttagggatcgtggatgacttgtttcttgggtatctgcagtggtcaggttctcagcaatagttaataagtagctgcaaaatgagtgaaaaatcctattgtctagtcagagatgtgacaagtgagttttgaatgacagtagaagccagcctggtcgccataaggagtttctgattgagaatcttcattcctggtaatggatggaacgatctcttgctccaaagagtgataactcttgctaactctatgagtttattagttttatacccagtttatgtctttgtgacctttctttctgccagaaagggatattcatgtggctctggtcaaagagtgtttgtcccagagtgggagctggcgaaatacctgttgtgtgggtgaaggttttccctttgtaaatttcccactgggttgcataagtggtgcagggtggagtccagttcttctacctacttaccccgttcttggcagagacactatattttagagaccctataagtgagaggtgtcagattccctctgagctgcatgctgtgtagttggcagggctccagaggagcccctcgggttgtaacacccatctgctgatgtgagtcttaaggagtacatgctttcttggaagcagggaactccattctttgagagtaagcagcgtcaaaggggactctgagccaaactcctatttaatccctttccccaaatcttagttttaataaaaaccagagcctgtcataatcactcagttgaggctcttgaacagctgaaaacaaggacctaactggaacacactagaacttgacttcaaagaaaatgatgcttcaatccatcatgtgaggggaactctgctaggaaacaacgttatttatggaacaaaccaggaaaccatgatgggatcatcgttgtgacaggtgcgcaaatgtatgtcgctcaagtgtcacagctgaaaggcctaacggagatgaggcccgggcacttcctgaatggatgttaaggtgcccgggcacctcttgaagggacattatgcttcagaaaatgagaacatgtcttttttttttttttttttttggtttttcaagacagggtttctctgtggctttggaggctgtcctggaactagctcttgtagaccagggtggtctcgaactcacagagatcctcctgcctccgcctcctgagtgctgggattaaaggcatgcgccaccaacgcccagcctatagaacaagtcttaaaaaacaaatctgatggcagtttagaacttacaggcccacaattctgttctaggtcatgtaatggatgactttctacttgtccccctataaaacagaggtggccaaggtgccaaaggccaatagttctgcttgggaacccactcacctctaaggggttaagtaggtgaaacacaagagtccagcattgttgaagtaaaagcgaggcactggagcgagaaggatgtctcaagacacccgctccccaacccatgcattaaaatggtgtacagcactcagtcatggatggctgtggtgcctaaaggaccacactgaaggtttctgttctgcttgcttctgagtccccggcagctctcagctgacacttaaaggacaaatttggagaaatgtctataaattgtcccaagttcagtttcatgagttcccaaatgggttagtagcgttagctcacagagttactgtgagggtgagttcataggagataatgtgcaaacacacaattttgcacgtgggacccagagtcagcactcaccatgccttagcttctctatttttaaaattcagtcacgaccgccatggggacagaatgcttcctgaatcttcaagacacagataggtataatgacaatatttctgttccctagctggccaaaccttaatgtttcccaggcatctggagtggctttcttaatatgaacaacaaaaatcaaatttgcaattcaagcctgagtccaagtgctaatgcatgcggggtgtcctagattgtagaacaggggagactgcattgttcaggttcaaaccaaatacattcccagagcaccacctgaaaggggctgtggaatagactcgtttccccaggggcttcacattctccactgctggccttttaaccaaatcttgatatatttttatcatgtattagcatttgcgagtatgagaaagacagcatcgaagatgttatgccatggtttttatgttcggttttgttatgtccaaaatagcagagcaatcttcacatcaattctctctgtctcatcatcctttgttttatggaaaggtggtctgaaaatctaattccctctttatgtccctcgtgggagaaggagctgtggggagggagacgtggagccggctgtgtgttggagaatctgacaagcagctcgctcagtgagtgggagactccttggctgcacacgagcaattgtcctgggagtccccactctcagagactcgggtcaatctcagctctaactgcctatctcaacaagactctggccctcttgcctcccagagcagaaaacctcttagtacactctgccctcatgaacaagcatggaagctttagtgaggcttagccctcttgtttccatgttaccaggcttacatagagatgttttctcccattaagggaagctgagctgccaggagctgaagtgtgccgttcagctaatgcctgtgacaatatgggttgctatcaggtgtcaagtgctttggagacataattccccttccagaatgctctagagatggcctcctctgcagtatggcttgatagctggtgtttatgttaaattacaggatatagatgaggtagaggaagtaagagaagagaaaaccagaggttgagagggacagaatggcatgtgcccctgagtgtattgtgtgtcccagatccacagtgataagaatagcaggtagctacacatcattgtttattgcaggctagccacaacagccaagatatggaaacgatccttcaacagagaaatagatttttaaaaacaatgtgatataggcctgggttagatgggttagtgggaaaaaacaaatagacaaacaacaaaaacctgttgccaagcctgacaagttaaattagattcccaggacctatgaggtggaatcagagagaaggcacccaaagactgtcctctgacctcatgtgtgtgctgtgacacagtcacatggcatatacattataacacacacacacacacacacacacacacacacacacacacacacacacacacgcgagagagagagagagagagagagagagagagagagaatatgaatatttttcagtcatagagaagaatgaataaaacatttgaaggaaaatagatgctagtagagagtatcatgttaaatgaagaaatctagtcccagaaagtcaaatattgcatgctttccctaatttgtgggtcctagactttatatagaggtacagaaaaatcacatatgtgcaggtgacagaaaagcagaagtaagagtctggggaacaaagcagataaatgggagagggggagtgaagagggaagtgcagacgatgcttgaagtatatcatgtacatgcatggggatggccttatatagcctggtttaataaaataatttctgagtgaattgctgtgccttttgagttacacgatcacaaaggataactgttatccttacagcagacttttgagccagtggactgatggttctatgctgggaaagagacagtgtttgcagggaggtggaagagaatgagtgggtggcacctgtttcaaggaaaaggatggctaaggtcaccagcctctgctgacatagtgaagtccattcctagtagagtcctgtggtgtcccctgacaccacaataaacaagacgctattccctgtgcggcgtccacccttgaccagcaagaaagacgccacatcgaggaatcttcttcaaacacagtttaatcgggaacctctttgctttgtacaatgtataatggcggcggccccgggccgagggagacggggcctgatatagtctacatctaccaatcacctaaccctacgtggcgcgccaggataggttgtctccaagcagaattaagaggatacatgacctttgcctaatttggagttgtttaccacagagagcgctcgccgtcgggctggcggagggcggaaaccggcgccatcttttgggtgcggttttctgcagctccctacatccctgtaacaagatctttttctctttagactgacacagttcctacaagctcaaagaaactctcattgcagtgtccctgattgaggaagaagttatccaggatcagtgagcttgggaataaagatgacagtcctacccataataataaagacccaaataaaataataggtgtggtgtaggcctgtactcccaacccagagaaggctatggtaggaggatgaagggttcaaggctaacctaggctacgtagtaagacctgtttaaaacaaactaaggaaaacaaaatcagctccctgctggaagacctggaaatgaaccaccatggtccctgccctctagtcctaaggagtgattttaaaagacagattcaatttgtttcattagacaggacttgagacatcatgagactgaacagtgtttgaggctcacatcagagaggtggctaaacccatattcaaattcaaactcagtctgactctgtagttggctccacatcctcatccaggactgggccaagtgccatcataccttcctcaaagatagatgtactcaaatgacaagtgcacagtactcccactgactatgcttttcaggagtccttggttccaccccatgcagttaagtctcaagaaggattattcttaggcatggatctgactaccattctctacaggtcactgtctctgttgagacagtttccaaaggatctctgcagcaaccaccaggcacttttcaggcagctctaactttcttcttccagtgtgactctgatcatgccctttcttcattccagactcttccgaactgcctgtgcccccccccagcattgtttaaaagaggtacacacagcccctgacttgatcctcctcccaccccaagtccttttctctttcttgcccacggacatgaagtaacctcaacattcactacatagttacgtgagtgtgagcacatgatataccttgagatctgcaccatttgctgattttgttactgaagcatcagagtaacgctaccaagtcaggggatcccactggatatgcagttcagtatgactgcgagggctctctgtggttcggtgctatattcagttatttgtggctccagcacaaattatgtttgttttccctctgatctttttgcatatgtgacaccttcttcagcttcttcattgggccatcatggttgctctgacagcccctccccatgactcctgaccttggtagggtgacccttcatgtgtttccctgacactggggtgcacatcacactgcaggactgctttcctttccttcatgagtgaaaaacaaacagttctcacttaaccacatcaagtttatagcatggctccttagatcaggcacaagcaaatgctgaactctgtgaggggatttggatcgaacaatttcttttggttatctgaagatgctttctcctctttaatgcttttgagaactccaaaggcccaaaggatcctctgtgggtgctataagaggacacacaaggcaacttaagatgagaaaaatagagtctaaaagtcagaatctttaagggacattgccaaggacatctcttctttattctattttatgtttattgggctttgcctgaaagggtgtttatgcaccatgtatgtgccttgtagccagaagagggcgccagattttgaggaactggagtgtagacagtagtgagctgctttgtgggtgctgggtattgaacctgggtcctctagacaagcagccggtgctcttaacagctgagtcatatctccagccccccaaggatatattttcacaaacatgtagaccccaaaggctgaacttcaaatattctcaagaggcttcctgtggttttttccctcctcacagctgtcccctcccccggtactagtttgtgtgactttcatttcctaactgttggcgacatggctccttccctgagatttggggatggattcaaatctatgctgcagatgttagcgaactccaggagagcgtcgtgattattttggtctattctgggcaaacctgaagatgattcactagcatcaatcatcgcatggttattctctttccattctatgagtagtaatacatctagggtcacatgaatgaatctgacttgcttattttgtctttgatggagtgacttagtatacacatatgttagatattctgtgtgtggatatgaacaatgttgaaacacttccagaatgttcccacatatgtaaatactcttacaacgacttgaagacttttagggatttggcttcctttttttctgttttcaagctttgttttgcaataagttattttaatttatttttatcagcatatgttaattgttcagaggtttccacggtggcatttccatatagacttataatgtacacttgatcatagtcaaggaattccattttctttagtgcccctccccctttagtggggctgtgaagctgttaataaggcagatgccctgattctgactccacaatccatggctaagcagctccgggtgctaagactggaacacagggtggtgggaggggctcagacatctcagaaatttaatgagttcctcgagttgtcctgagatagctggattacaatctcctgcatttagacactggggtccagacttcagttaccgctggattctggtattctggcatctgtgattagatttttgaagacacacacccaaacaacatggattatttcctacttgctccggggcatctcataagtagaaccagggaactgtactctagaatgagatcttcctgacctcaggggatcatgaattgaatgcaagattgatggatttccatcattttttcatgaaaaggtatgcacatattttaacactttgggtttttctgagcatagcaatatctgttactattccccataccacacaaccaatggataaagggcactatgcatctatctttgcgggctctgcagcttcagggtcaatccatgtccaagaacatggaccatcccagaaaacaaaaacatccacaaaggtgctgacagaagtcggatacatttgtttgaaagagatcttcccaacaggcagaacggcacagaaagaaaagagaaaatcataacctaactttgtgaagcccttgcaaatctcacaaactctcagaaatgagagagaaaacatcataaacaaacttaacatctgacaatataactatatgccataaacatatagtttgaatgtaattgccccccataagctcatagagagtgccactattaggaggtgtggctttgttgcaataggtatggccttgttggagaaagtgtgtcactgtgggggtgggctttgaagtcatatatgctcaagccacaccagtgagacaaaccacttcctgttgcctgctgatgaagatatataaccccctgctccttctgcagcaccatgtctgcctgcacgccacaatgtcccaccatgatgataatggactaaacctttgaaactgtgagccacccaactaaatgttttcctttataagagttgctgtggtcatggtgtctcctcacaacaacagaaaccctaactaagacacatacctagtatacataaacccagagattaaaattctgcttgtgaggaattcccgaatggtagtttcctggacctgtttggttgaaaacgctgggtctctggaagagatacatactcggaaaattttgccgtttccattttgaaatgctttgggaaacatgggatttccctcaaagggctttgcccttagtggacatcaaaaatgtcaaagaatccccttggaaggcctgtagacatggaacctgtgccaaggagccagcactacccacagcatttcaaggccattgtgtgctgatggtacttctttcccagttttggaacacagacacccaaatctggctgtgaggtccttaattcattagttttagacttttctaaatttttttatgaacaatggaattttagggtatgcttttatctttggttatgcttaaatgtgtagtaagcaccacaacaatggatgccaacacactgggagcagtggtagacaaggtccttgacatttagaaacactatgtcccaagagctccaagtttccaagtacatatatgtccatataggctcttggctttctcacaactgaaggaatacattacatttcatcccggccgcaagggacccgggtactctttctatgtgacatttaagtagttttcatgagcactgatgaaataatgaaccactcattaagaccaagatggcaatccctacagtcaccaaggctgtgtgattctgcaggagtgtggagtgtttatcagataactcaatttattgtttagtaagtgatttaaggtattgttggtatgcagtttctaatggactgaaaactgccaggcatcatgctaagggcattgtatcttaattttttaaatttatttttattgtgacagggtcttactatggagctctggctggcctagatctcaatatgtagaccaggagggcctcaaactcacagagatgtatccacctgcctctgtctactgatttgtgagagtaaaggcatgcactaccatatctgatccatttttatttgtctatttattttgagactgggtctcatgtagcacaggctggatcccaattggggccaatttcatgccctggcctcaggctcccaagtaattatattatagggtctagcaccatctttggctggtgcttttcatttgccaccttgactaatcatcatcataactgttatggtggaagttccacccaagccccgccccccatctccctccaaaccctgctgcatctcagaaagcccatcagataatggcccctcccccagagatgctcaagatcactcccacagggtatttaaattgtcccccggagaacagacttttcctgtctccctttccctgtatcctctctgggggactggaaggccatccaggagctctgtatccattaaacgtaggtttttttctaatttgatttgatttggtctgatttggattgttgcattggcagagaggcttatccaggtgtagaaacttttcaataacctgtgatggctgggaatgcttcagcaaggacaggtaactcacattcctctcaaaggctgctcttacccattcttctcctgatgactcagcaaagcctgctgataaattctaggtgcttttgaatctgtcatggaagcatcccaaggaggatctgcccatggctgagtcagatctgcctgcttcacagaaagactggtgattttctgcgagaaagacgctgtaccacaggtttatcactaactagtttagggagtgatgcctgcagcatcagctgggcagcatcatcaggcagtgggtatttgcatccagagggttcctacactccagagctttctcaggaaaatctccacagggaccagcagctgctgtcaaaacccagtcagagccccaaaggacacacacggacacacacggacacacacggacacacacggacacacacacacacacacacacacacacacacacacacagcatttactttttaaggacaagaaacaatatccttaggggtctctcccagtagtttttactagaagtcatgcatacattttctattccaacatacctgtaggcatgaccttgtgttattttctgaattttctaatgggattttatttatagctgtaaagaaacaaagaaaggaggtggggaagaaggaagagccataaggaaggaagggaaccaacgagaagacatgatctgtgtcattcccggctggagactcctacacacaaggagggcgaaagtgcagcaggccagggccaggccgaggttctgtttgtttgctttctgggaaggacgaggcaggaggagaaacacttcacagaggttcagtgattttctctcccttgggttggacccaagaatatttttattccactgtttactcaaaatgtcctctttctcaatgaggaattctcacttttgtttttagccccttgtgagatcctccctccctccttctctctctctctgtctctctctgtctctctctctctctccccctctctctctctctccctctttccctccccccttctctccagctctgaagtcctgcaccagcttaggagatgcaaatagcccagcgcttccagatgtgaggagacacttttgaataaaacccagcacacattcatgtctctttggaatgcaaaagtattgaaataggtctataaaaaaatctccagtttccctcaaagaggtcaagagctccattttctatccagctgtcattgtgttactgggtgagtgcacctaggcagccgagagtcaccccccaatgagggcacataaattccatattctccccattccccacaaacctatgcgagtgtgcaaacgaacatgattcttactactagacagcacctgacgcctagacccccatttcatcgcacagttttgctccagatgtgaaggctgagtgcctgggctttcattatcaaccaggggattgtgctatgtatggctgtgtctttcagcgtgtgcatgtatgtgcccttgtgtgcaggcctatgcctgagcatgcagaggccagacattgacgtcggttgttatcctctatctttctctgcctttttttttttttttttttttttgagtctcttatttaatctggagctgggtgattctgctagacagactggcctggcaagtttggggtgggggtgtgttcctggttccacctctgaacacttggattacttatgagcatagccaaatgcccagattttcacatgggtactaggaaccaaacatgggttcataggcttactcagaaagccctttaacaagtgattctttagactttttccaccaacaggacacaaggcaggccaggaggacttttctcttctgagtcaatctccatgcaaagggtaagacacccacatacatgtgccataggaggcatgttctcataaacggacaaatatgaaggttgcaatgtccagttgggtggcagtacataccaccaattgacatggaagcagcagcagcctggagcctgccagctgagccttcctgtgtggggagatgctgctcagcttcatcccagctgaaattcatttttcaaaagaaattagacagaggtactgttgttatagcaacagtcagagtcatttaggcacacagtttcttttccacaacctcactgacttctgcgggcagtatttcatttatgcaaggggagtggctaaggctgagcctgcacggaccctttattagcctttaagatatgaaagcctgagtcctctatggccaatctaaagccccatgacaattttatgtgttccagagggtgagcagggaaggccagcaaaaaccctctgaatccagtatttccatctcctgggttaggaactgaatgtgtcagggatgaatttcctggcttatccaaagactggcagccccgaggaggaatttccaagagcatggtaatgcagtcagtgaactgggaagtgacttcattatttcagttctataggactttggggcatagacttcctaatgtgatagcccacaccaaccactgaaaacaatactctacccccaaacgatcttgttctgaggaaaatgtgcatctcttaaggaatcttcatgtcaaaggacttcccagaaaagtgccaccagggctatacaagggtggtaaaagcctgagcctattgctcatggccaatgttacagaacaactgtgtctcccaccacacaccaatccgtatatctaagtcccagccaccagaaactcagctgtgattatattggagtcagagcctttataaggctattaagacaaaataaggttttttaggatgttggtgactgtgtgcccttacaggaagaaattagggcacacacagaaaggacttgtggggacacagataaagaagcacctgccagcccaagtgagatggctgtcttagtccacttgcacaattgcagcaaaatgccagcctggataacttataaaaagcaatttatttgtcacaatcttgaatgtttggaagtgcaagatcaagagactggaaaggtcagggtccagtgagccccactcctctggaacagtgtccaagtctggtgagccctgttcctatggaatgacatcatctagatctccagcagaaaagtaaaagagaaaaacttgttcgctttagccttttagtctatgccaacccgcacagagtgacttactcaactccagagaccccactgttaagcattaccacatggggattcagttcagcactgaattccaggagacattcagaccacagcaagggcccagaagaaatcaaccttgctcataccttgagttggacttcaaagcctctagaactatgagggggtacatttctgatgcttacatagtctagtatattatactttgccataagagccttggtggacaagactaacaatttgattcaagcctatccctgtcctctcagctaggtcaagctcttaattactaccacaaaagaccatcttgcacagccttgtccaggctttggtttaattgaccggtaggcacgggttctgcatctgacctcaacaactttcaggatggagacaacagggaagcaggcaaaaggcaacagtgtagtagtttgtgtgtctcttggtctatggaggaaaggctcctaagatttgaggagttcgtggtcatggagcaactgttcaggcagtgggaacacatctttgttcagaaaagaaagaagcacatttgtgagcaagacctcaagcacttttgtctgtctttagccacagtgttcagagtgcaaacgtgggtaagagagcctagagaaagaagcaggggccacagggatcatgaagagctgacctgtgtcagggagtgtggtccagaagacactagggaaaaatcactaacttgtgatgttagtttctgatttgataatgataaaaatatacaataagtgaccaaagatgaaaccttcacagtgatccatactgtcttgctagggctcccatatcaagatagctacagtgtaatgtggagtgttaccccaaaggcccatatgttaaaggcctgttccccagcctgggtcagtattaggaggcagagggaccatcaccaggtaaagctgatctagaggaagtatttgttttctgccccacagccagcatgaagtaaaagcttcctcttctacacatttctacatggtgtcttatgtcaccacagacccaaacagtggcaccaagtgaccatgggctgaaaacaccatccaaaatcaatccttcatcattctgaatggatttttctcaggtgtctgccatatgacagaatgctgatcaagacaggctaaaacaaatctaaacttcaccgttctggcagctggatgtttgagttcaaagggttcttgaactctctgtagaatacagagggctacattttccctctgtcctcacatggtctctcctctgccataccacagcttttgtgtctgtgtgtccagtttctcttcttatgaaaacaggggtcatatgtgtaaggagtgcccaccttacaggctttgctgtaatttaaatggccctatctccaaacacggtcaatctcttaggacttcagcctctgaatttgagagaggcatgattcagctcatacagaatccaataccatttttgcacagcttattagagaaatgtctaaaggtactctcaagttataaatcaacaggatatggagttgacctaaagaaaacaattgacaattactgctttacccgaatttaacaatgctttattttaaaagtgtctgtttgcctgcattcattacttttctcactgctctgacaaaatttatggcacaaaaacaagttaagggggctggagggatggaacatctggctaagacacccactaccaagcctgaagacctgggtttgagtcctggaacacatacagtagagtgagagtaaccagcggcccagagtggcctctgaccttcacaatgtgagttgtggcacatgggagtgtacacacatacacaaataatagcaaaattattattatattataaaagtgcttccgattcacttgttaacatcctaactcctgacaagccctcagacagacagaggtgggtctgctgcagttcaagaggccctgaagagattgccttgttccctgagaacaagtaaatgttccttcacagtgacacctgacctcagagggatacaacagagagaaaactgaagcagagaaaggatgggttccccactccagcccagtatcccacagtaaatcacagggctcacaataggtttgtcaccttcctgcccagactgtggtgcactgtcaatgtcctgtaaaactgtagagccaagctaagcatgccagtgattttatctctaacctagccaacaagacattatttatgctgtttccattagaatgctacagtcaagtttgcatagtacttcctataactacctactagtgctcagttatggctctcataaaactccccagggacagatttttttccatctcactctcacttcagaagttagaaaaaatttaacaacagatgatgattttagagatatttttgaagttgtttgaatgggaaagaaagtaggtttttttttttaaagccacaatgaatattttgccaccttttgtccaatctagcaccataaatcaaatgaactgatcataaagccactaggcaaggcgatgtaatagatttcactggcgactgcccacactgccagactgaactaaatgaggtctgcattcacgtggttatcagtgtttaaaaataccccgagtgtagagtgtacacaacacaaaatgtcaggaacttgaaaagcaaaaatatgcatgtggtgttttccaaatctctctatagcccagcaactaaacaaacttaattatgtgaccaagcagcagctatttaacctctccagacctctgcttcctccgttataaagtgaaagagttgtggtatgtggtctctgagaattgttccagctctgagagtctctcttcaggccctggattcagatcaatagcttacattcacaaccaccctggaaggcaccgttaactcaaacgcacacttgaacttggcaggttcttactcactgagatctttgtggcataaagcaagcagccattgctcatctgcaaaggtttttttagtatattgggaagaaaaattatacttgagacttaattacaagtatcttcaaaaatccggcaagtaaacgaagtgtgtaaattacatgattaatttaaaagtagattattttcttcccctgatggcacacctggtatcaggtgctgagctgggtacagaggatatgaaagctgcacaggactcagatgttgaaggacttgcagcctgctgctagctcttacttagctccccagtgttgaacagctcctgccatgggtcatactagtctgacacagccagcactgttgcattggctggcagccacagcaacacaactgtttgtggttcctctccattgaacggtttttaataaatgcctttaagtgacacgaagagcctgaacatatcaggtttaggtaattagataccaggccaggttataagaagatgtcaagggcctaagatgtggctcagtgtggaatacagcaagtacaaggttcagggtttgatccctagtacttcagttagaaaaaataattaatcaagccagatcagtggcatatactacctacaatcccagcattctggaggctgaggtagcaatacaaattagaggctagcctgaactacacaatgagaccctgtctgaaacaaacaaacaaacaacaagcaagcaagcaagcaagcaaacaaacaaaccatatctgtagttatttctaggcattgtgtagtaacacctagctaagtttaaactctgataatattgcctctagctgtaacttggcaaagggccaacctgatatttctcccttcctacaaagagcttaccctgtaaaaggatcggtctaataaagacgataagggaaatgcttaacctacttaagacagaaacgagcctagaagactcaaggactcaagagactcagatttaaataaacaattgatacacacattctaaattcttctcatatattagagtagttccccaagggtgtttatttactaacagtttgaattgctcttgatacttctaaaatatatcacactcgatatatatttaccacgatacttcaattccaatttttctcaattcaggaagctttttccccaaattagtttgaattagggagcgtctattgtattcataaactcttcatctaaatggcagaaatggcgacgataacatccgtcttgggtttgctggaagtctgcagtttgacttccagtctgagactggggaagaatgaacatgagctgattaatggccattactgatttctcgcagctgtaacttatcggaatatgtatactctaatactgtacccatggtaattatctcattactatgaagtgtcacagaaacgcattatgcgaagtgagcgttgaatcacagttagcaatttcttttggatatgaagcctgaggagctttgtcacagctttgattggctgccatgcacccaggctggagtcccttggcagctctgtcacctggctccctttgtgaaacttttctgcacctcagtctctaatttgaaaatgggaagatttgtgtgtgaccagagagatggccgaaaagctagctgctcatctccaacaaaagcactgaggtaatactcagcctgcacagttgtcactctgactgcatcaatatttaatatagaatgagcaaggtcacataatattaagcagacatattcccccaacattgctaaaccaaagacatgacagttctggaaatgtggcttgggtggaagagtgcttatcttgtatgcatgaggccctggattggatacccagcacctcctaaagcaggcatggtataattcctacactcaagaggatcggaagttcaaggtcatccttagcaacagagtgagttcaaggccaggctgggttgcatgaaactctgtctaaaacacaaacaaaatgaaaacacaaacaaaatgaaaacccaaataaatggcaaacaaagcaggaccataaagtcatccatgcactggcacaagaaagccaaaactgatgataggccttgttctgtacatcatagtgtttgagcagggtggcaggtaaaaaacagttttctctcacttcagaagatgtggccccagaaaggagctggtgagtacttgattgtcacccatcaaacatataaggctgcctaaccaaagtaggcacatcatgggaaatggacaccattgcttagatgagagaagtcagcaaagacaagcaatgtatcaatgacagaccaaaggaaaacaccaggactgaggagatggcacagttggtaaaatgtttgacttacaagcatgagaattcaagtccaatacatcaggacacataaacaaagtcagctgtggtggtatgtacttggaaccccattaggggaagcagagatagggattcctggggtctctagccagactgcttccctatttgccagtcccagtgggggaaccttgaaaccctgcatttccatcatttgggaaatgattagacatgcagtttgtcagctattcccacactttctgaatccctaacctaactctccagatgttctcttagaagcagaactcattgtaaagagttatatgagaagatgacatgttttccatctgtcctgatgcctccatcagagatacttgtggtcacctgagctttttaaattctattaaattgccaggatgcacttggggaggcagaggcaggaggatctcagtgagtttgaggccagcctggtgtacatagtgagttccaggactgccagagtcacatagtgagactctgtcccccaaaaaacaaaacaaaacaaaagaaccaaacaaaaacaacaaaacaatttaattataaaaaagctccacatgcctagcatgaccacactgggcaacaaagctttagaacttgccagtggatcagtaaagggaaacagacggttctgattagagatcagagttgtgactcttgcatataagaaacctgcttggaaaagccagaagggcaaaagtcaccatgtatgtcatgaggtaaagtaaaggctttttcaggaaggcaattatgggtatacaggacaaaaaaggtcaacgggaaggagaggctggtgtgaacaaaagtacattagggttgggcaatccaggaggcctaccggaggtgtcttatgtataatccacttggaacaatactagcaacataaatttgtatatgtgtgtgtatgtcacgtgtatgcatacctgcagaggccagaagaggactccagaccccctggatctggagttataggtggttatgagccacctgacaacgggtttggtaacctgggtcctctggacccagcaaggattcttaaccactgagccacccctccaggattcttccatcttgcaatgccaaaagttcaagtccatagtcagctccccattctgccccaaccccagcctttaacatctggcctctatgatttagctgcactagctactgactagctagctaacagtaaatttgtctttcatgagtggaatattttactcattataatgtccttaaggttcatagatgtgatatcagaatttctttcctttttaaaactaatatttcacagtatgatgctttaaggtaaatgtttgcattttcctgcaatgttcctatgttgaaatcctaagctcctgggtgagaggcataagaaacgtggctttggggaggtcatatgggttctatttcatgagtaagattagtgccctgataaaggagaccccagagagcaccaccattccctctggcacgtgggacacggaaagaagacaattatctgattgaagacaggttctccctgggcggtgagtctacttgcactttgagttttgaacttgctagcttctaaaatcctgagaaatgcatttccattgtttatatgccaccagactgtggtattctgttatagtagcacgcgtggaccaaaacggattgcaaaggtctcactctgcttctccatttatctacggatggacatttgaccctttccctggggtcaacagagctgataacgaacacaggggaacaaatacccaaccaagaccccactttcattctttcaggtgaacactgagcagtgggattgctgggacatatggtaattctatttttaactttttttgagaaactgacataccgttttcctttgcaaatgtgccattgtgcatcccatggaggtctttgtttttgagataataaagaacagcacatcaaagctatcagaaagaacgattaaaagacaaatgtgggggagagggtctttggaaagggaaggaacagcacggcttgcagcttccattttctcagtgaccttggttcaaggtcatcactcccggaagcaagccataccatagaggaggagaacatgggagcttgccctacagcattggtccatcacaaggcaacaacacttcctgaaggttgacaacagacacagatccactgctgggggtgagctcctatcccataatacctcagaacatggctttttaaaaaaacgtggtctctgcagatgaaatcagttaggatgaagtcacaccggagtagaatgagccccaagccattacagcttgttcatcttagaagcaagtggtcatgtaaacacaagtgacacacaagtgaaacacaatgctacaggacagcagagtcagcaactgcaggatacagttacaagtcaagcgtgctagagtccactggcaaactccaggaggacaggaaggaatccatgactcttacaaaggagtcttacagggcgcttggccctggtcagtgcccggctttcccaacacccaggactgtgaggaaacacatttttagggttttctaacccacactgtgcaccttgttatggaagctccaggaattcatcaagccatggagcacaagtctgcagttggccaaggtcatcccatgtgaaggccaaaaagagcatttgcaaattactgttcgtctcacttatgagtaatatgttccccgacctccgtgataatctaggcagtaagtcaacataatacatactttgaattgcagtccttactgaaaggttttccttatgcccattccaggcagaacgggggcatgcacagaaacacactaaattctctgcttctaagaaccaatgaacagaaatctcagcacccaaagcatgcaagctgaggctatctatcaacagctgtcctgtttagatgctctgggtcttatttcacacacacccctctgaactataatcacaagtaggcctgactattgttccacctgtaaatgtcaaaaatctccctgattttcaaagttctatatatgtctgcttttgtgtactttgttctttatcccaagccccaataaggttttgttgttgtttggatactggatgtaacccaggcctcacctacgctaagtacatgcttttccatcctaagcactccaggaatatttgttgaaaagcagtcatatagttgttttctgatgtccacacttgtgtttcttggaaaaaactcagagataaagcaataattacggatggatgaagccatttaggaaaggctgctaggaaccaactcctggccagccctctgaggtaaatgtgcaatgctgatgagagctacggggtcaaggggccttgtggggtcagcattttcattgacttcagagtcagatgagggctgaagtccttcccaaggcctagcaggtgcggcctggatgcatggccccgctgctgctgatatagaagcagtgtagattatttggttaaacagcacaaccttgaacactggccaagtcaaagcacaaatccataacaaagtctttctcctgcagtccatttgctagccgccttctaaacaccactctagcttttgtaaaaattacctctattctagtgaaagacgaggcactacaaagtgccattgcagaaaaacaaaacaaacaacaacaaagctccgctcttccccccaaaaaacctctggacacaagaaaacaacagcaacaacaaaatgagtaacacattccttctctccctcccacatccccctcatatttaaaaaaaaaaagtatttagattttggcttttcatgaaagaaatttcttaaaagtatcagtgttcccaaattccaaagtaatttcacaaccataaagaaacgagggagggaatggtttcggcaaggccttcaaaacaatcaccctatgcttctatgtggagtatctttataaatgataaagggctttgcaaaaattaacccaccccttcaatggaaatgcccggaacattatttatgcactggggcctgtgtgagacacagggatgaagagatgagtaaggttgaatcacctgaaagaacttgttacagagggaagcaggtaatagtgttattcactgtaatgttcccaggcttccagtgcctgtgattttaattcataaggaaccatattgtgtgaggggggatagggagagtgagggaagaaggtagggtaagggagaggggaacgaccacagtaaatctcataaaggtggcagatcgctccggatactgctgccatctgagccgaggtctcttctgaactaagggcaaggaaagaggagacagcagaatgcctaacagaaccaaagctcagcgatcacaggacgcaacatgagggaaattcacagtggattggatgaggaaattatagatgggaccaaaatcaattaaaaaggaaaatgaaacaagctggaatgaagtcaaaagcatcctttcctccagaactgcccctgagtatcagctgcagagagacacggtttcacagacaaagagatccaagcctggcactaataccacaatttgcacatattttgggttcaattgagctgagccaatatgaataccaaactcaggtttacagatgtgactacaggcttgctttaaaccacaggctgagaagcaactacacatgtaataaatctgaaatcatccaatgaccttcagtcaactgggaggcttatatttaccccaaataagcatcagccttccctattacaaagatatgcaaatgactcccagactcccatgttgcagaatcattctgggtagttgatgactctggtctcaactgtcgaggagcaaggggaaggtttgagagagtgatcaggaaaacactacagctgtcagttggcaaaagcaatgcgttaacacagcctgcattaactgctaccggaatgtcagcattcaggaagaggggaaaaactcctctttggaaacagactctttttgcaaaattttctgagttaattaagccagttttcatattagcaaagagagatggccatgtctagtcaacatgcagtgactcagagagtgacaaggttagtgggcctgtgtctatttttaaatgttaatttcggatagtctcacagagcttgcataggcagtaagtgtctttcccattattatgttctactccagtacatattcaagggttagaccccaaatgttcctcccttccaaccattactgatggagatcaagggactgatagattcccacaaagaacgcttcatctcataggggtatatgtctatgccccaagtaccttgtcaagctggagtctaaatagcattggggtattctttgatctcccacatcaagggataaggcaccttgaatggagcatggttttaacttggataaatcctaacctcttcatcttaaatacatcatgtgtgttggggtggggggcaggctggtgagacagggaggagatgggtacagaattcctttggaatcaaactttggtgaacccctgaagtacggctgacagcaggtcagaaccaaactagccgtaactcagatgctcagcaatttgggctcttttcaagttatcatcagtcaatattttacaagagagacagagagaaagaacgaatatatgaattttgcatatacttggcaaagtaaagaacttttactcccacaccaatttctgaggtaagttaataagcatcatttattcaaataaggagcctggaactgagatagactaaataaactacccaaggtcacagagctagctctattgagttgagatttgaattccaaggtccatgcttcccatcataggcctctctacttgagagtggaatgaatttctcagtccccagtgaaagcatggctcctaagagagagcagaagtggagaacagcctgcctctgagcagcactccctcccaggacacaggaggaagagctatatataagtggattccctgtcaggatggacagttccgtcaggtgttcatatgacaattctacagttgtttcatttgcagaggtctaactaactgtacactggccactaatccagctagcccaatttcaaagagaatgatactgtacttggcaaactactcacgcaggccactgtggtgatggatcaggcagcactttctagggacatcactgtagagtcaccaacagaatcacacacttcccaggaattccaatcctctcaccagcatctggaaagctgtcacctttctagctcaccttagcctcaacccttaaaacccttaaaagtagacacaggccaaccaacacctcattgtcatcactgccaaaatccacactatgctggtcctaccttcacactgctatgccacgttctcttgttggtacctttaaatttcattaggctcttttcatggtttggagtgtatgtataaaggaggggacaacctcaggtaccctcgaccttgctttctgagataggccctgctggcctgactcaccactagccaaggctgactgtctagtgagtcccaggcatctgcagtttcagcactggaattataaatgtgtgctatcatgccttgcttttttttgtgttggttccagagactgaactcaggttctcatgcttttgagtcaaacaccttaccaactgagcattctttccaggctgaggtttggatcttaagtgtctcccaaagtcccaagtgcaaaaggcttgtttagcctgcctgtggcactactggaacctgaggaaatggggcttaatgggaagaagttaggaccctgggctgttgagactctggcccccacctctcctcttcctatttctcatatgatgagcagtttgtctgcagcatgcacgatgcaatgctgtaccatgccatcaaagcccggaacctcaggaccagggaaccatggactgaaacctccataagctgttctcctttgaggggacttttctaagttacgctatcatgatgcaagatgctgactaaatgagactgggctgatgtggccggtggtggtggaggcacagtgaggtcacagaaacaaaccacccaccaacacagcttatagatgtcactttcctccctggctagtagctcgactataaccttcaacattttccagagtgttctgaacaccctgtggatattctgccatagacactgagataataatgcagatgtaaagttttgagtgacacaatcagaattataaaatattggcacaggtgatttcttaaaatgaaggtttatacaaaaaaaatggacttcaggaactctgaaaactctgaaaagttgtatgtagagttttgctggtggtcttagaaagatggctcattggttaagagttttatgggtgtatttttttttcagaaagcaatccaaaactttcatcagattcttagtgtggctggtgagtctctgaaagtttcaaaacaagtctcctagagttagcaggaacaaacaagatttgctgggtacaactgtaaagttctgtggttaagtcaagaattgtctcagcaactttggtttccttcaagtcaactctcttgtaattgtaggttgcattaatgaatgcatgttctctcaatccagggagacaaatgaatgtgtgttctaccacggtggcttctgtgaggctgagctctgtatcaggagccatgaaaagccacccagggaacaatcacatgatggagaactgaaggagtctagggtattaaacctgagaaagagaagagggtatggttggttcctccttaaacagttgatgatccctaataggaaaagaacagggtttaacctgtgcaggtccagaatataaagtaagatcaggttgcctgtcagtggagaaaggatccatccccacaaggggaacttggaaacaaaacaacaacaaaagccctattagggagattcggccaccttctagggctaatgagcatcccgtctcttaacttttcctaccaagtttacacattcacctgccagggatttgcagaggttttcggggtttttttgtttgtttgttttgttttttattggtggaaggtaggagaaatgacctctacaattgcttcttaagctatgatccatctattaagttttcatatctcttattaacaattttagtcaaagatttgcaaatattttccaattgtggaatacttaaggcagatccctctaaaaagagaaaaatgactaagtgttgagttttccatattttgttaaaatgagatatacgtgggtgtggtcagtgtgcatgcctcccacttgtcgctcctctgagtttccattgtcttttctgaggtgaccctcctatcaaccacagttattgcactattcacctcaattcccaccctctccggtctaccctctacaataaccatcaagaaaaatatagaactgggcatggtggcacatacctttaatcccagcactagggaagcagagataggtggatctctgtgagttcaaggccagtctggtctctatagtgagtctcaggacagccagggaaacacagagaaacctgtctctaaaacaaaacaaaacaaaaaccaccctttcaaaagagagagagatagaaaaaaaagaatcagatcatgcctttctgcctaaatttccacagatttttttggttttcttgaagccaaatttgtcacatggcttagaagatgtcaggtgccctagtatctccaaactcatttggccccaccctccctataacattgcactcttgggaagatgacctctccttggctctccctacctctgcagttccctccatgtgttgaggagctggttcagctttccccaggaaggaagttgccctgttcaccccaattcactccctacctttctctaccacttcagtttcatcttgattgtaccacttgtcacaatttataatcatcttgctttgaattcctcccccttggaccatcctcttcctcataggagtgcagactcagtggcaacgaccttgtctgcttgactttcttctacatttgagtctcaggcagccagcatctgagtggtgtccaggaagtatttgggaatgaatgaatgaatgaatgaatgaatgaatgaatgagtaatctgtggatcagtgttttgggggtgtgtgtaaatgtgacttgtgttctcctaagtctgaagcatgaatatttactcagtcttcatccttatgaaagtgctatacatatcgcaagcccaagagaattttggaatgacccctaagaagctccttcaccaaacagaaattctaagatcagaaagaactctttcactggagaggggggggggagacactgacaacacctctggtttcctcctctggtttttccagagggtaaaatcctaaagggtcccgatttgaagatagtttgtcttttttccccccttgagggctttcataaaatattctggcagtaaggaacaagagattctgggacgggtgactgaggaggtgggagagactacttctctggatagctttaaaaatagagcagccatctgggatggtttagatacgcctctctgaaggcgggggaactggaggggaatgaaggatctaagtaccatctcatcttggattttctgatatttcattttggagttttattcatggcaaaagcctgagaggagctagaaattcactttttcttttcaaccaaacattaaatcccattttattttgagcggcaattctgctgtctcactagcccccattcttcagaagggcaatttggatgtcatgcattttttgtctcgtaggaagtttggatgaaagttaactttcactctctttcctagagacgcagcacaggagttaggatgggaggtgtgtttagatgttgggaactgatggctggggatgtgtaaatctctacttggtttttggccatgccagtggaaaggatagagcagacagaatctatacctaatggactgcctagcatcttgtgagctgtgctacatcccaaacctggacctgttgcaggaggctaagccctggaagccttgtttcattgtaactactgggtcttcctttcatttgtttgttgttggtttgatgaaattaatctcagtaaagtcaatatgcaaacaagtatattttctgacataaagccatttcctgaccttgttcccattattcttgcttattgcatcaaaacttcattgtcaaaagcttaatgtattgtaagacatagaaggtcatattttagcatttttaccatagagaccacactggggaaaaaaggggccttgtgaaatttgtttctcagcagtatttgcatgccctaactgctttttaaaaatccaaataaacttgattgtgcttatcaaatacattaattttaaaatgctcattacaggcacttttgtacataacaaactaacaaccagtgtgagccaagttatttatccccacaaaggaacacaaacagcttacaatgatgacattaacttttttgtctttttgaaagttaatgaataatccatattttagcagaaaattaacttaaaaagctggaacaatggctcagccgttaagagtattctctgcacttgtagaggacaagacctcagtttctagtacccatgtcagatggctcataattgccagctcccagggctctgacatcctcttctgacctcctagggtacctgcacacatatgtccgtatgcattcacatagatatacatttattaatgtaacattaataaataaatctttaaaaaaatcattgccttaaagcaagtccttcagggttttcacaaaccataattggaaacggatcttatcatgtcacatgatgtcaatcacacacctacatttatttcttcatctcctgattgttcttaggtcaagggttgagtgtctacctatgtgctcctctgtgcattgtgctagaaccagaacttcaatatcagagagtctaaggcagaaacaaagattccttgtgctggttattttctttgttttactcctttttttttttcctttatttttttgtcaatttgacacaagctggagtcaccttgaaggagggaacttcaactgagaaaatgcctccatcagactggcttgtaggcaagctaggggtatttgcttgattactgattgatggcaccaccactatgggtggtgccatccctggacaggttttattagaagaaggctgagcaagccagtaagcagggtttccctatggcctccgtttcagttcctgccttgagttcctgccctgacatcccttcatgatggactggaagaggtagataagattttcaaaagttttcccaagttgcttttggtcatggtgtttatcccagagatagaaagcaaactaggacactccagaccctaacactaaccctggaatgtaattcagttggtaaagcagttgtcaaacatgtctgagactctgtgttccttccgtagccttgcataaaccaggcatggtggtacatggtggaatcccagcactggggaggtggaggcatctttgggtacaaagcgagttctagtctactctgaaaccccatctcaaaacaaacaaagcaagtaagcaaacaaatgaaacctttcaaaaaacgaaaggcagaagtgaatagtctaaaagaatattaatgaaatgaatgactttaaggtgttttctgtcaaaatcgacagactgtttgttacactggaacatcttgttacacaatggcctcttgttaagggatggaggatgaggatatgtccacatggacatttaacagcagaatggaaggtcttcagggaccttgccctttgagatgcatggctccaacttcccatccctaaggctccagtcactgggggtgagtgctgggcaggagctgagctatctctggggtgggatacttaccccctcggtgagactggactgatttggacccagccatgtcagagcagaaaacaatgaagacaaaagcagaccttctgcctgctgtagaatcttctttgtctccacttacccaactgaggcaactgagaacacagctctcccactttctctggatgaaccctgatgctccctttcttctcccttttaatccagtttgcctctcatttctttctgaccatcaggagttcagcatacccccccccacacacacacagagtttccaggcttcaggatggcccggattgaggctggctgcaatgtgttgatttcaccagctccctctccccctccactctggctggcacactggaagctggccactttgtgtatttacaaaccacagttctctgtctgcctccctcccccaagcggcttgctgctgttactcctgtggggttttcctcacagccctccctcacgaatttaacaccaccactcccttggtgcaaaacaagcgtggggagcttgttggggcttgcaaaaagcaggggtgggggctgctttcctcgggtccgttcattgccaccgccaatgttaacagcaatctgtggggagatggcaattctaacataatgagatattaatgagttttgcacgtgtccctagccacaacacacttctagtcccctcccctttcaccttctcttctagaaaaccacagagaatgggctccatccttgacagcaggaattctatgtttctccttggggctcatcctgactggctccaataggggcctagccaccctgctcacctcaagccatcagcactacagaacaccaaatgggctggcatcgccttgtttcctggcctaatggatgcttgtttaaacaccggagctgtttgcattgctgcggctcactgcctgttaaacacagtcctctgaaaccctatgccaatccaataaaggtatcagcagttcagtgtggggaggcaattactatacagtcccaagtgtgccttctaagctctaggaaggaaaatgtgatcgaacaactaaaaggaaaatctgattcggctcagcatcacgtggaggacacaaggcttaactgcagccaggtctgcagagggcagagggaaatcaatcggctagcaagcaagcacacattgttaggcaagcactaagccagccggttagtaacactgtcccctgcgcttgccagaggcactgccagtccaagccttccgctccctttggcctgctagctcgctttgtcatcccaagggctacacttacttatattttaatgacaaactgtcatttttctgaacaccctgtatcttctctctcacctttaattccttaagcactcacataaaaatggcttttcttgtgcaagatcattaccatatcaaaggagtcagagagggagtaaaaatgatagaggggtaatacacacaggcaggcaggcagaagaagacaagcacgcttcagagaggcctcaggcccctcacctcgaactaatgatagcagtcaataaggcaatggatctgtgttctgcctcagctaaggctgaagtcaggggaattagacaccaggtttacgtgatttctctcccaagaagaagttttgggaaaatgaattctttcctgtgttacgaagttctgagcacagtgggaatgggttgctttcccctctgttccatttaaaaagctgctccaaaatggccctcctttctctaggaagagtgagaaacagcaatgcatgtgtctggcaacactggggaacgctatccacaatgctcactggggcgccatccatttcctaggaatctggccaaatccctgtctattccccaaggttcctggcacaggggacagagacatgatggagctgaagccttgtagtcagcatttgccaggcagctcctgcacatgggtgcgggggcggggtggggggggagctatgcctataacgggctccatgagcagcatggatttcccgtcatccctgttgtctcagtgctgggagcatggagggagctgggcccatgatggcactggcagtgttcagccgcactcagaatagcattcaatcctgcaggcttatggggctggcacactgacttcccagaatatcagccatgtaccttcactagctactgtttcttctgtgctggccttggacaaaactccagtcccatcccccagtttccagaagggtggtggtcacaggcagtaaagttccaccagacagacagcatgactctactgccactctggaagaagcatcagactctgtcactttctcttgtcactcaacagctatgacaactaattaaaaatggtcatcttcttgggggctggagagatggctcagaggttaagagcaccggctgctcttccagaggtcctgagttcaattcccagcaaccacggtggctcacaaccattcgttatgagatctggtgtcctcttctgatgtgcagatatacatggaagcagaatgttgtatacataataaataaaatctttaaaaaaaatgctcatcttcgacacctgtatctgtaaaccaccaatacatgttcttcatgatttcctgacttaacattcacagaacaccctctttattttaggcctggaaatataggtatggtgtacatgctgaaactacaaaaaaattatgatggatgtatttcttgtcctacctatggggaagagaaatgttctacttaaagagttctctctctctctctctctctctctctctcacacacacacacacacacacacatacacatcatcatcatcatcatcatctcaatattttatttaaatactttccttatttttgagattaaaatatgaatatattaaaatataatcatttccccttccctccaaagtctcccatgtacccctcttgttttctttcaaattcatagcctctgttttctttaattgttgttacacacacacacacacacacacacacacacacacacacacacattcctaaatacatgaacacaaccttctcagttgatacaatgttagttgtatatacatatccatgttttcagggctgaccatttggtatccttctcttgggaagactgtttctcccacttcagcagtcattggttgtctatagtttttgtctggagttgaggactcatggacattcattcctccatccacttttagcatgtccactgttatcctccttgtccagcttatgtttggccagtcatactggtgggactttatggatgtagcttttgatatttctaggagacacaatctcacagcaaactccctgatcctctggctctcacaatctttccacccctcttcctaaatgatgcctgagcctcacacgcaggagttgtgttgtagaggtatccactggaactgggctccacaactccgcattttgattagtggtggttttctgtagtgatctctgtctgttgcaaaaaaaggcttccttggtgaggggtgaagattacacttatatgtttagaccctggagaaggatccatcttaatattttaaagggcaacttacatgtgcatgtgcatgtgcgggcgtgcgtgcctgtgtgtgtgtgtttatgtatacatatatgtatatatatgctaagtttaaaacattaccatgtttatacacacacacacccttcctttttaataaattactcaaactaaactttaaaagcttctaagcctctgtgacaagaccttgctgcacccattctgttacttgcttggtttctctgcaggtagataattaactttttctcataacttactggtcataagttactggccttgttattggtgttatgcctgctgtttctttgtctaagggggaaaaggctagctatttgattaacagctacctttcttttttgtatgtatgcatgtattgtttttgcacaacaaccaatttcccctccctcttctcatcccagcctctccccccccccccccaccccccccccccccccccacacacactccatttctcttcagaacaggacaggcctcccatggacatcagccagccatggtatatcaagttgtagtgagactaggcacctcctctcctattaatgctgcttgaggcaacccagtaggaagaaagagtccccaaagcaggcaacagagtcaaagatagtccctgttctcactgttaggagtcccataagaagaccaagctacacaattgtgaaatatatgcacaggacttagaccagtcccatatagactccctgattgttggttcagtctctgtgaactcctgtaagcccaggttagtagtttttgtgtgttttcttgtggtgtccttgacccctctggctcctacaatcattcctcccttctgtaggattccccgagctctgcctaacgtttggctgtgggtctctgcatctgttttcatcaattgctgggaccattggtctaggcaccaatctatgagtatagcagaatatcattaggaatcacttcattgccttttttttttctatcatgtttgattctaccctaggtctctaggctatccagcctctgggtcctggctatccaggcagtgtccaggtgagctccctcttgtgcatgacatgggtctctagctggaccagtcattagttggccactcccacaatttctgtgccacctttaccccagcacatcttgtaggcaggacaaattgtaggtcaaaggtttttgtggttgggttggtgtcccaatctctccactggaagtcttgcctggttaagggagatggccagttcaggcttggtatccccctttgctaggagtcttagctgggtcaccctcatagattcccgagagtttccattgcactagctacctttcttaagaagagaactttgcaaaagatggtgaaacaatgtttttgtgagacttgctcttgaccctgttctgggacagtacttagctgtatttccaggatctggagtcagcagtggtgccagaactgatcctcaataatgtgtaatgctcctacctccactcagcagaataaacatgcttttatttctttctccagtgtttggtgcattgccttaaaaaaaaaaaaaagcagactccaaacttctttaaactgttttcttttctctcaaaccagagatagaaactcataacatctctgctcctataatgtcatcctactctcgagatagcaggtgagctgtaataaatcacaggaagaaatctactccacagctagagaagcatggtaaaaggaactgcttgggacccagggtgatgctgtggtgtaaatcctagcactgaaaggctgggacaggaggatcatggacttgaggccatcctgggctacctagtatgaatctgtctcaaaaaacaaaaaacacctgcaagcaagaaaacaaaccaaacagagagagtgattctgagatgttaaagcagaggcagtcacagaaggatatgtgacacactcctgtgaggctgaattttcaatgtgtgtaaagaactactttaaatatacagaatcatctctggaatccttaaatcttcacttctcatttacataaagatttctatttttctcatttgtcacatgttttttatttattttgagacatggtctctctctatgaagcctaaacttgctgtgtatctcaagctggcctcaacatcaagttcctcctgtctgtttctgctttccaagtgctgagattacatatgtgcaccactatgtcgggttcacacatgaggtttccctgtgtgcactctgaaatgtgtcattttgagttgagacttggtacctgtgatggttaatcttctgtgtcaatttgatgggatttagaacctggagggaagtctgacttcaggtatgtctatgagggtgttttggaatacccaccctaaacatgggtgacatcatcccaaggtctggggtcccagaatgaatgaaaaaggagaaagtacatggatggctatcattcatctctctcttctcttcactgtgaatgcaatgtgaccggatgtctcatgctcagctgccatgtcttctctgttatggtggctgtgagccaaaataaactgttccttctaaagttgcttttgtcaggtatttagtgacagcaattagaaaaataacatttgctggttggcctgtctagctaaatcagtgaatctatcttcaggtgcagagagagagagagagagagagagagagagagagagagagagatctgtctcagaaaacatgatgcatcatgattgacagtgacctctgatattgacctctattcccacaagtgcccggtgctcacctacacatacatcagcacacacatgcacccaaaatacaggtaaaaatgtaaaaggtgagttttgggattacactaaaagcataacttacgccatgggccctttgtaaagcattaaaggaatcaccttttctttaaccatcttcagaattaggtcagtcttgtgaaaatggggaggggaggaaagatctttgaatccttgcatttttaataaaataaagtggccgaaagaagggaaaaagcattactcctaaatccatgaaaattaaaaaaaaatcatgaagaatggtaagaatgagccacatgctgccccttcattctcgctatggatgaacatctaattttaggtacttgtctggttcagatggacaagatatactctacttttctgtatacttgaacattttcaaaatgaaaaaactctcttcaaaagtatgatggctatggaaaagaagatgcctaagggtggaggaagccatacatcacagtccagtccattaagatggagagccctgagcagccaatctgaaagttgcaatgtgaggagaagaggagcacgatgcatagaagatgggccatggtccaacccagaaggcatcacaggatgccagggaggcctaagacgacagcgctcagctggttaagtcctgatctcagaagaggactagcagaaccagtttcacttgaaaaacaaaacagccactgacagtgtaagaaatatggttttttatcaagcccacagaaaggacttctttcataggggctcggctctacatctcgaagtgagtgggaacacaggatagaagacaaaggaaaggatactaagtgagaaggataaagacaaaatgtgagtgcttggctttcttagaaggtagattgggtcttctttggttaaagaaatacactattaattacctgtagttcctcttcaaaacaattttgtaaattgtaccttttttttactaacaaaaaaaatgtgcaaaacagcccaaaagctctttttgtccttcaggcaagtttctctaatgccatcttacataaccatggtccaattttcaggaacaggagattaactttcacacatattattaattaatctatagaccttaatagaattctactctactttccatcattttctgtcgtgggtgccctactcaggattctcccacagtgccttattgattttattctccccagtctcttcctgcctgcagaaattccccagtctcagtgggctggtgcagtattcttttcacatgtggaaggagcttttgcatttttagaaaggccactgtaaagtgatgttgcatccccctcggtgtatcacattgaaggatgcgtgatgccaatgtgccttttgctttgatgcttctcaagccttgggctaaatggtcgtgcactggtaaccctgctataaagtcaccgtcctttccttttgtggccaatcatatcttcaggaaggtgtgttgagactgtttgtgtccgatttctccttacaccactgtccacttgttgtgtgtgcatcttggttcttatgatgtttcatgcctcatggagaacctgtttcttgtgatgctagttattattttgagttctacttaggaaagagttgatccttcctcctttgtaaaattatttatatcagcatgcatgctgagtatttatttgctcttatggtttacaactcaatgctgccattttttccctttggtagggaaaggggggctgggattggacccagggtctcatataaacaaggatggcaaagccagcccttgggttttgagacagggtcttctatatatgtcaccgttgcctcaaagtcactatgcacctgcctcatcctcttaatgctaagattataggtgtgtgccaccatactcacacagaagcactaaatttccagtagggttgaaaactactaaaaagcaaacatttgtagatggttatacaatgtaatttactcatggtagtgatcagccactgctactgagttatcgcttagtgctctcttctgggacacttggtagacagcatttgactaggaattgtccacattttatccattatcactcaacacctattaaaacacccatgaagcttgagccagtaagtagttttagaacatctaggttagcaccaagcattgcaacaactttattaatgtagatgcaattgtttgtcttaggggacagctaaaactgaaatacacttagtgtccgtacaaccatcaacagcatgttactcagtgtctcatttacaggcaatggctagactgcttggagaatattcatttttcaaattcaagaagcaaccaagagttgactgctatgtcgcaggccacgtttatgatgttattattgggcatacaagcaaaatgtgggccgaggacatacctcaggtggtacagtgattgtctagcatgcactaagacctaggttagattcccagtactatacaccacagtcctagtgctcaggaggtggagacagaaggatccagagtgagatcatcctccactatatggtgagtttgagaccagcctggaatacatgagattcttacacacacacacacacacagagagagagagagagagagagagagcgcaaagggctctgtttttctttgcattcagccatgctgacaggcaataggaaaggcacatgtgtgggccaagagatagtagtttttttgtttttgtttgtttgtttgtttgtttgttttgttttgttttgtttttcgagacagggtttctctgtgtagctttggagcctatcctggcactcgctctggagaccaggctggcctcgaactcacagagatccacctgcctctgcctcccaagtgctgggattaaagtcgtgcgctaccaacacccagcaatagtttttatatattaggatggataactttggagacatagacctgttgggaaatccagcatggatggacagccctgcccagtcagggaacccagacagggacaggctggatccacaaatgtcctccctgtccttcatataggtgagcaagcttcaagccttatttcagacaaagtgtcccttgctacccaaggctctctccaagtgaagctcctgaaatggttctaacaacagaattttttttccaccaaaatcagatcattgcaatcgtcagcaaagaaaatgacatgtaattgaattatgctcttcaggatatgaaagtaccacgtggaagatggaggctggctactctttttcttcaggggagtccaaagggccacagtggagaacaggtctccacccacaaaaagaaaacctttgggatcagcaaagttgttcactgtcagaatcattcccaggcagattgtgaagatgaacttctatggcgaactcatagagagactgaggaaggctgtccccatctcagcagcaccaagacatgctgaggctgggaaataaccctgcctagggacagctgagcagctgtgttgtccgggaaggagccccctagttaagaagttgccctactaggaatcacacttgaaagttagggaagcagggtcggcaggatggagggcaaacctcacgtgaagcacactgatgggacagttaggagcaaagctaccaatggctgaagatacatcttcactgcactgtcctcatcgctgcagcaagacactcgtcccagccccctagtggccactgtgtgtaaagaggaagagtccccccttccttccttccttccttccttccttccttccttccttccttccttccttcctcccttccttccttctttccttcctnnnnnnnnnnnnnnnnnncccccccccccccccccccccccccccccctctctccctctctccctctctctctctctctctctctctctctctctctctctctctctcattttttgagacaaatttctctatgttgccttggctctcctgtgtagatcaacaggcctccaactcaagagatccgcctgtctctatctcccgagtgtcagtattaaaggtgtacaacaccacctcccggagcacctagtggatagtcttgctttcttcacaagtttttctttgtgtccttggggtgcatatgtatgtgggtgcacatacatatggaggccagaggtcaacctgagtggataccttcctcagtcacttctctatcttaattatttagcttaaaacatttttacttattattactgtgtggtggtggtggtggtggtggtggtggtggtggtggtgtgtgtgtgtgtgtgtgtgtgtgtgtgtgtgtgtgtgtgcatgtgcgcacatatgtgccatggtgcacatgtggaattcagtggacacctgtagaccaggttctcttcttccatctgcatgtagatctggaggttgaactcaggtcatccagcctgcatctctacccaactgagccatcttatactcctaccacagggtccctcagtgactctagaactcatgactgccagccccagggatcctcctgtctgtacctctctagtgtagggattacagccaagtaccacctagcctcactatgtggattctggagatccaaacattcttgtggaccaagcactttacccaccaagccaccgtccgagcccctcacacactctctctcttgtgtagctggggaatgatgtgaccctagatctttgtttattaatcacattttagtgtgctgacttgttagactaccatgttatcaactgaatcgtcgatgattttctttgcttctggtcatgaaactgaaggttctattactttctcagtaggccagtaggcagtgtgaattgtgagtggtaatatatctacagtatcatgttcaatttcacaaaaaaaggcagaaaatatggaggagagtgaggagaaaggtgggtcccaccttcttttatctccttcggtgagtgaggtcctggagctgtgtcctcaattctaacacagactctccaaggtcaacaggacacaattaagaatcttaatgatggggctggagagatggctcagaggttaaggacactaactattcttccagaggtcctgagttcagttcccagcaaccacatggtggctcacaaccatctgtaatgagatatagtgtcctcttctgttgtgtaggcatacatggaggcagaatgttgtaagcataaaaaataaatctttaaaaaaaatcttattggtgccagaagagctttaaactaagctggagtactaggtgccatgtgtccttgccactgtgcagtggggctcctttctttttggtgtctgtgccctgctcccttggctatctcttctaagctctcactgggtgagagatgggtcacccatctccttccactgaaactatcactcgcttttcttcccagtgtggactgcctagaacagcaagtgcatatcaaacgcttttgtgtcctttgttcttataatctaacaggcattttacgcttcaacatgatgcctgatgctcttgaacgtcctaagtccctctgtcagttttctacatccaggttcctgaacacttactgagtcaatgaaacatctatcctttctcaaaggaacagcagctccttcggcctatccttactgcgtctaagcacctggccatgctcccaccagtctctcccagcatgcctattgctgcaatagccttctggagggtgagaccactagcgaaaatgtcctgatttgcatactagtttaaatagtggttctgcctgctcttctttgtctacatttagatgggaaagacactcattcgtctctcttggaagtttttaattgtgtatgtgtgtgtagtgtacaacttgtaagaactggttttctaccatgtaggtctcaaggattgaactcaagctgtcagaccaggaaatacacatctttactccctaagccttttggcaggcccattcttctctcatcacggggtgctaatctagctttcttctgttctcacattttgactatttggtgtatatattagttttccactggtttatgaatttttgttagcttgatgtgcttgctcacgcgcacacacacacacacacacacacacacacacacacacatttctcactaatttgcactattagaaaatggcggtatgttataatatgagaaacaatgagagcgtactttaagagaaatgaagtcctattgatctcaggaccaggcaagctaaggttagctcaatgttgcttagttaacaggtacttggagccagttaagtgcttaataactagataaggcttatttgtaattagcatattgattgttgacatgtgagtgcttctaaagtgctggaggggagctgaaaatggcttgtcaggctttgtttcaaatagcctcttacaggccatttatttcaataaaatcaacactgttttctagccatggtcattgctgaacaaggaaacatccaccaaagtttccaagtaagtatagttaaataatgatccttgttcctagtacaatgttaccaaagacccccttaaaggagttcatctgactgaccagccattgaaagatgtgatgctcaaggacagagtctggttcagtcagtgaagagaatagcccccatacactcatgcatttgaatgcttggtcctcactgggtggaactttttgggaagaactaggaggtgtggccttgttgaaggaggtatgtcactgggctttgagggtttcaaaagctcatgttattcccagttatctctgcctcctccttggggataaggatataagctctcagctaatgctccagcactatgcatgcctgcctgttgccaagctgcccagcatgatggaatggactctgaccctcagagactgtaaggtctctttcttctataagttgtataggtcatggtttctctttaaggctacagaaaagtgctaagtaactaaaacagtcagctttgacccaaaggaaagaagtctttgcccataactggtggaatgtggttattctcttaagatggcaccatggcaggttgggtaggagtcaacactgctgaaggacagtgggaaaccaaacgatggcaaaggcctgtggtctcactgaagcaaaagtgcttgggagagcagtttgctcttcggcttctgaaatgtattggaaacagagactcagatgtaagtttcactgacagtagaacttacaggtcactgaagacccaagggcaggtgggtgagtcctaagtgccaacacctaaggaccttactgtgaggaaccagagatgatgaaacagaaagaacaaagaagggaagactacagaagagaaagggagaggaaacaagaagggggaaaggacagaggaagatggggtggatggaggcacgataggacagaggataaggcaactgtgactgaccctgaggaggatgcagtttgaccctggagactccctttttggccttttctactctggctcagcttataatcctccttcagagtgaccctctctgtccttggagctgagctaagctgagcatgtccttgctactgcttaggaacctcctggtgtactctaaccatccttctaaaaagataaggcaggtgtgcagggctgtgcatgtggcaggatagagacaccacatgcaacactgcgaaatctgtctgccaagacggacaaacctcctgaaatgcttctagactttgagacagaacacaaaagtccccagcctgccaggatccccaaggccctacatccttacagtgaagaaagctgtcagtcatggactgccttgacccgatgccagtgacagcacgagacgcatcacactcctgtaaagttctctgtcaggacagctctccttgctgcatatttatgtaatccaattggccaatcaaacttcaaggctaatgaatgattactgtaacagacagctcttgaccagcactgcctttccactttccgaggtcagcctagagctgtgtctgcaaacaggatcagcagggaggaggaaacctggggaggacatgctcatgtgtgagcaagtgtgcagtgagtgtgtgaacatgtgcgtgctagtgtgcatatggaaatgtgtgtgagtacataagcctgagcatattggaaaattgtgttagttgtcatctatgtgtaccaatgtatgagtagatttgaacacatgctaattgtgtactgggcaaacagatatgccatgtttatatgctaatgtatgcctgggtatgtactcatgagtgtatcagaatgtgtgtgaatgtgtgtctgtgtggcttgagtgtatctgagtacagtgagtatatatgaatatgtatgtgagtgtgtaaatatatacggctaagtgtatgaatatatgtgactatatgtgaatgggtgaacatgactgtgtctgtttgaggggaagggacaagagcaaattaaaaggcacagcctgggaaggttgtgagactgtcttccctcagctggagatccaggctcctgtgcaggaaaagagcgagcctttttctgaatgttacagagctttgctacccatcagagagcagaagctgttgtctccaaatggccttcatccttctcccaagaggagagccaggaagactgccactcatatgccaatactttctacacacaccactggtcaaaaaggagccatggatgccctccaccctgactcaaaagtatgcccagcttggagacctcagtttccacaggggaagaatctcaggggttggaaaaccagagcagagcatttcccctaaatgtcagggaaatactctgggccacgactgttgttttttcaaacctgtttgctccccctccactctgtacctacacagaaagcaagactctctgactgcagcgagaaaataaagcccaaggcacacagtaattttctgcttgttgaatcttgtgcctggtttgtttcaataaagccaggtttctgtggcatcacctggccaatctttagagcaggcacttctgagagagagtggagtggtgtttagcacaagatctctgctttgccagctactcaatgtcatgggcaacatactgctgtcagcatccactcaattagaaggtattaatcatctctttactgctgtactctggtactgtcaccccctccctcagagagacactgtgtcagccgacttctgcaatgcagtcatccgcgtggcaaccacaaaaccacatctttttatttatttatttttctcggactgatattctattaatccttagaagtttattagttctgactcataacagtccatcagctataagtgcaataaatgatgcttggaaattaatacccgcatttcggcaaaggaggtttttacatattaaattatccttaaggttataaataaataacatgtgaaatagatttaagcaataaacatatatttggcaaacaatcttcagtaagtttaatattctgcaagctagagctattttggcaatatctttttaataggctctccactccccgccttgcttttcttccctggtaaaatcataaatccatcatatcaaatattggagccgttcctttctcaggaaaactagggcttcttgtaatgcttcttctaaatgcttcatcttccccatattgtgttttattatttattttttgacttttgttcttgttgagtgacttagggcttttgttcttaatttaaatttttaaaagttttatttttacacgttctgttatttggtgttttcctagctttcttcgagtatgtttggcaaataaaactgtatatatttaaggtatgaagcatgatgtttgatccatgtgcacatttcaaaatgatcaccacaatcaagttactaaacatatcgatagcttcacacacttgccctttgtgtgtgtggtgagagcccttgagatccactcttggggactggagagctagctcagaggtaagtgttcggctcttctgagggacctgagtttgtttctctgcatatacaatggttgcctcacaacttcctgtaactccaattcattggggatctgaccttctagcctctgagggcacccacactcaagtacacacatacacacacacacacacacacacacacacacacacaggagagaaagacagacagatatacagagagaggctgagagacaaaaagactaagttattaaaaataaaattttaaaaaatccactgtcttgtcagtttttaagtataagtacaattgactatacttaccatgttatacattagattttcagaatttacttatcttgtaagctgaaagtttatactgtttgacacctccctattttcccagcactagctcctggaaatgactattctactgtctgctcctgtaagtgcacatttttaaattccctgtgtaagtgagatcatgaatcatgaagtgtttgtctttctgtgtctagtttattttgctctcatcattgtcctccagctttgtctgtattattgcaaaaaaaaaatgctgaatcgtgtgtgtgtgtgtgtgtgtgtgtgtgtgtgtgtgtgtgtgtgtgtgtgtgtgtgtgtgcgctacttcacttagtagatgattagactgataccacttcttgaccattgtgagcagggcttcgataaaccaaggagggacagacatctctttgagatactgactttgtatcctttggatatacattccaaagtaggattgctacattgtgtcatagctccgtttttaatttctttgagaaccctccacatggttatccataatggctgtactaatctacattcccatcaatgtcacttaaaaaaatctaattcagaaaaatgtctgagatatgttcccacctcctcttctttttctcctatccatcaatgaaaccacttcatcggcttttagaaagggaatcttacttagattttgagtttttaaaatactgaaaacattagaaagttgtattggggggcggggaggctggctcaggagccaggaggtttgtttgtttgtttgctatattatgaaaggagggagagaacagtttctacagatatcaaagaattacatcacagttttatccaaaataaatcagaaaaaacctgtttattatgcttttgtttatcctatgagaacaagaaaggcacagtatatagtattgtttgtcaaagctatatttcttattatattaattctctaaaagattcatccaaaagttttatagtgatattctttttttcagtactgaattaaatctgtataattttatcacatttagcccctcatgaaaatgcaattatcaaacccttgtttcatataactaaatactttattcattattaaccccactcacagacttaatgtacaaaaaggaaacgccacaagattcatgtcagtggcaatttaaagtgaattagggttaacgatgaaggtctgatctactctagtctgatataaataaataacacacaggcaatagacttaagtgataaacatatactcaagtcatgagatccatcaaggggcctttctattgcttaacatcacaggcaaccaaagctgggattcagattttcacccacacctccgcttttgtctttggtcccatcttaatgtgtcagtgccttctgtgcacagacatgctctctacttacagctgcagagagctgggtccataaattacatcacaactgcctgtctgcacacaaatcccaaactcagaaatgtcacacgtcacacagatcaagttgcatggctgtccgatctctatccctgctggatgatggggctggagagatgagagctagtttagatactgcaaacctagagttctgtgtttctcctagtggcagcatgcatgtatgtgctcatatccctaccatgcctggtaacaatagggctaagtgtagccccagcatcaaggctgaccaaatacaatgacgtgtccttaagaaatgacagcaaacattagagctccctttagttttgggtaagggattactgcagatctggggcctcagtagcaagaaattgtctaacgagtgggttgagtctaatgaccacatatacagtatcgttattggcttgcagcaaaggacactaaattacagtcacaatgtgatttgctcaggtcacacagactcatatcagggtctactttgcactagaaatgcttctgacactaattcaagtcaggctaccagaacagaatactcaaacaatcaggaaatataatggtgttctaatacatgcattcatattggattagccagggatatgtgtacacacttagattactaacactcttggtaaacaagggcaaagcctgtctccaaactaagggatttccatatatagacattcatatgtattcaccataaaatagtggatttccttttgtttcaagggctccccaatggctcaagacaaaaacataaatcaaaaacgaactcatctttttcttgaaaaaaaaaaaaaacaagatatatactatacacattatgtgaaaacaataagactaaatttgatggtctgtattatccacagtgttgagccaatctatcaacatgtttagatatataaatccaataaataccataatctctaagtaactcactggcttaccaaactgggtggaatcatttcactggtctcttgttggtgccctatcttggatgaagagacagttaattgttcaaattttgttctacccaggaaacgtcaacaacacaattataaattgctggatgacaaatacccctgatatctctgagtaaggcaacatatagggctctgtgtgtgtgtgtgtgtgtgtgtgtgtgtgtgtgtgtgtgtgtgtgtgtgtgtaagagagaggggagctttattacaattttgtatgtgtggtatgtggcgggggttggggttggggtgagtgtgccatggaattcatgtggaggtcagagaacaactttgtggagccagtcctttcctttccttctcccttaaggtggttcccaggaatgaactcaggttgtcaagcttgcagaagcgcccttacctgctaagccatcttgcctcccctcaacaggtatttttggagtgaagtaaagatctatctggcaaaaggtatgctagtattctgattccccagtctctacacacttctctgctgcaatggttgggtggtttgtagcatccttacagtcacctgcccctctctactacgacatggctccttctccccattctttccttagtttcacttgccgagagtagctccacttgggttgctgccactttctttctccatatgcatgccaccttatgtgtgtgtggcgtctgagttacacctaaagctttactagaatggttagagtgggccctctctcctcgccaactttgtgacttcaaacatggcacttgctctaagtattcttcctcacctatacagagggtactaattcagttctgtgatgactgcagagacaggaaactcaccgggtctgcagaaggcactcaataaatactgtcagatattgtttatttcagaccagggtgccaaggggatcccagggtttccgaaagctgcgtaagttatcttagaatccttatacatattttcaagacttggcctccttttggggacccacttgcttttccctgggaacactagatttctggatgctttcttcagtagccatctacttatcccccctcacacaccacttctcactaagagcacagtgcaggtcagattttatctcactctgcatcaatacacagagagactatggaagatgctgctgtcaggactgagtgtgatggcacatatctgtaactccagcccttagaaggctgaggcggacggatttttgagttcaaagccagcctgagtcacacagggagtccctatctttaacaacaacaacaaaaatgtattaccaggaattggttcaattcctagactttgttattaatgatattgttctgcgatctatgttaaatatagatcatgggtgatgctgacgaattggctggctctcacatttgggttagttcattttatgctcacaccattataaattacagtgttctccacccctactatgtagatttggtttaggatttcattatgatgactgatactctcccgttttcataaaaaacatgctggctttttaattttgctttctatttctaggttagctgtacattattgacaacttaggctgtccagattataggatttggcaatatgttatatttagaatacatttgaaagttcttttcagagaagatgatttttttttcctagtcttagttgctatgtatgtgttagaccttggtcttctcacataattatgaagattttgcaaaacgacccactgacctatgaatgtgtatgattgtaattctctaaaataaagtcatggacaggatggggcaggaagagacaggctgaggcttaggtacaaatcctccaatagtacttagcgtgtttgctaaatgttctccccatgtgttgggctgtagctgaagcctcgtacacaactgatcctaggacagcagctgatcatcagaattcgttttgttgctatagtagtactgagctgccggggaggattctgggagcaaagaggccagacatcatctgtgtacacttgcctgtatgggtgtgaatgtatggtgtgtgtgtgtgtgcttttagaggggttgatacatgctaaactctctctctctctctctctctctctctctctctctctctctgtgtgtgtgtgtgtgtgtgtgtgtgtgtgtgtgtgtgtgtgtgtgtgtttagaggggctgatacatgctaaaccctgttaggagctgtgaatctcagtccctagaccttttggtttagtactatatataactgaatgaatgacccaatattcttcatgttagaaacctttaatgctgaaacaacctagagatttcactatattcactgttggtcaagcactatgagatgtggaaagccaataaccatgctatctatgtataggacctgttctgaaggctgctgaggacagggatggggctcagcagtttcccattcttggctctcctgctgacatgccatggcctggaacttttctaatcactaagttctaggattaacctagacatagcactgtccaaaagaatcagagcagtcatcttgtccatgtcattaccatgtggccatggtctaaagtcactgctccccaccaaccttaggcttttagttaaattgctcaccagaaaaattatttgaaacaattcccaacatatgatttcattattgtttttgttaccaaagtatgtcatcattgtacagtcctccactataaacttcagaaaactcaagaatatagttttccatgtaaagaaactctacattaaatgtgtaaactatatagacacaggcaacattaggaaatggaaccgtcatttggtcattttcatctccaaagctaaataaagcaggtattggtgaaataacaaagagacaaaagattttcagctttttaggttaatttaggcaagctttgtttgggatggggtgggggtggggagactgtgctgaaaaataatgactgaaactcaaaacaacagatacatcactgcaaaagtaaatgtttacatatgcatatttgcatttcagacctttttcagtaaggacatgtaaaagtacatgattttttagcaaatgtataaatcagcatttattttatttctagatgagaaatatgagttgaaaaaaatgcaaaagaatgtctcaccacaggtttaaaacaaacaacaaaaagcttcctaaatgaaaaactaagttgcacaatggtgttttgaagagtgtctctctgctaactgtgatcacaagacttcacagggctgagagctgcttctcttgtagagagaagggcaaaataatcatggtgttacctacatgtgtgaaagaaggtacttctggagacaggcagggtcagcaggaaggaatcaagaagagatcctgcccttatggaatgggcagaggctggaaaaggaaaagattcaggctttggaagtagagagaagcgaagctgtaatcggagccctgggaggccaccagccaagggaggcaggccctgtgaggctgctggcggattaaagcgataagcctgcggtagcattcctggaattctaggtggtgaccagctctgcttgctagggactgcatgtgcaggatcattctgtctaaaaccgaaatgttaagaacaagggtagattttgcttttaaaacatttgtttttatagtatgtgtgtgggtattttgtctgcatgtgtatctgtataccatgtgcataccagctacccaaggaggccaggaaagagcatcagaccctctggaactagagtaacaatgattgtgagctgccatgtgggtgctgggaattgaacctgggtcctcaggaagagcagccattgttcttaactgcagaaacatctctctagcccaagagctgaattcttttcctgaatctctcaacttagattcagtaactgcacacaatgaagacattcttatgcaggtgacagattcggacaatcttttggttatccattgcagaaaacatgggatatgacttggtgtggttgtaagtacagagtcatttttcaaaagacgtttccactttccctacctttcagtgcccagtactgaaacagtttctaggagattgtgctttggggttcccctactctcctcgccttttggtgtatgcatgccagcaaacccggactcaggtggtttctctttgttttgttcttttgaggcagggtctcctgacctggaactcacttatttgcctttggccaggtaagccccagagggccctctgtctctgcatcctggtgttacaggcaggccagtttgcttgctttggaaatgtggattctgggagtggaatttagttctgcttgcaagcactttacctcctgggctatctctctagccctaagacttactcttaactctaaggttttattttgatgttaggggctgctgactgcttggtgtcaattcctctttttaaatagcggtgcattcatcaacactagaagctaactacagccaaggcagcatgtcccacagcactctgtagtctttctacacatcacttaaccaaagatacttaaatgtcaacaaaccctccaactaattttcagcgaagttcatagacttcactgattttaaacagcccctcagaagacatatttaataaacatttgtctaattcatactttcccacaattgataaaagaactgattgagactgtagttctcccaagttctggcttaaccagcacaggttcctctttctgcctgtgtaaaatgtcataggaaaccatgaatccaaccaggagtttttagtcactatgtgaaccagatgggaaaggacgaaggtgctgcctgggagcaaacagccttctcagggccccagggcaccactcctaatagatgtgtgtgcagctcacatcccagccctgatcagctacatcccatttcagtactaggtatctttgaatggaaacatgttgagtttctccacatggcatgatgggagaatcagaatgggaaacattaataaaccttacacacactttttccccacaaagcatgagctggaaacagttatctttctttgttccaccttgatttctttggagttagccattcaagacagacagtactgaaaatatgcctcatgtaaggtgtggtaaattcttacgtgcagaagctaacacatctatatctatatcgataataaaaattgtttttgaaagcaaagggtttattaattatctcaacacaccatctaggctgattctttcagacgcagggaatgtgggctttagcaaattttcacggttgataggaaggactcaaggccagacccgaatacttttcagtctgtgtaatgagcctggtgatccgagtcatctcaatgcagtaacttctcagaagctaaacatacaggggtgtgtaagttcacaaaagcaactcctgaagactcatgtggtaactatcccacatatagctgctggctctgggactagcataatgaataataactgattgtttctctatttggtaagtgtatagtaagtatatgcgcacgtgtgtgcagctatgtgtgctcaagcatatgtggggaagtcagaagatgacaccctgcgccatcattgtccatcaaactgccttgagacatggtctctcactgaactaggagcaaagctggtggatagtcatcccagcaatccgttatccctcacccccaccaccaaactcatgacatactcagctctttccacaggttttgaagatttgaacttgggtcctcaagcttgctcagcaagagctcttacccattgaaccatttctccagcccctaattagtgatgttttaaaaatataggtttttactctggaaaaaaatatttccaaaagaattagtacattatttaagcaaaatcaaaatgaaagccttctacacatcctagatggcattctaggttctatattccatcaactcctgatctgatgttccaaaagggaaatgaaaatggcacacaaacttctccagacattgatatgtacatctctctctctctctctctccctctctctctctctctctctctctcacacacacacacacacacacataactctcagccacactcagaaactttctcacacactttctcacacacactctcactcatatatacacactcttgcatacacactaactcacacaaacacactctctgacacacatactcagaaactcacttactcaactctctctcttaacacacacacacacacacacacacacacacacacacacactttacaaaagaaaattttcaacacactataattcagttcatttcctgagggaaagctctacgttttattctaaatatagaggaggcctctgtcgtgttcagcctcttgtattggtttgtttttaacattagtcatgaatatggcagtggctcttttgcataaaaatcatcatttctgaagatacatacataggaggtgtggaaatggggcacatatacgccccacacacacataccttggaatagattttcttaaaatctttggtccatttgtggctgccttggctttctgaatccctaaaccaacttcttttaaatggtctgtctcattgctttccaggtcatgcagtatagtttgctacacagcccacttactagacttccacattctataaggctgcctccctctccccagtgatgatgcttttaagacaagctatacacaccaggatgtcctgctctgtgcagtactgaagtattgtcatgaaaacaacaaattcccaggcatgttggcttagcctcagtgtcatttaatagaagtagcagaacctcatcttgccaaccacctagaggtctctagtaggaagtagggctaattttaatatatgaggctaaaagatgctccttacaaagtagcttaaaatgtttggcatttcgtattcctgctatttgagaccctgtaactgctacttaccaggaacaaattaatctaagctttagccccctcaaatacagaattataattatgctgcatttcattggattattttgaagattaaaggtgattatgcatgcatttatgtgtatatataaatacacaaacacatcctatagtgcctggcatgtagaaaaactcaaagctaactattaatattttagggataggatttttatcacaatagacactactagaaaattccccaactatttaaaagatcaatgagatgcacaggaggcaaacacactcctgatcagcctttctcctctagcccatatccttcacttgaccagtgagaacaattgatgggccttaacagaaaacatttcggctttcaattaactgcttggaaaagcactaaaaactgtattcaactgctctcgggcaattagaccatgaccattgccacatctgctatttgctcatcaggaagctgcttccaagacatttaacattcataggtatattagctcattattaataccctagaaactccccatggcacggttaactacggtgcaggatttggtatataagaaggctccatcctggctcccattcatctaagaggattatgaatggagtctccctaacgttataaactgatcttaaacatgtaaggaattatagtaaagctctgaggtataaaagtttttccagaaactgcttttccaccatcacaactctctacttatattttatttcattgtcatagcaaatgcttacacagaactgtgtagaaaacactttgatgcaatgaatctgcacaagatcatacaagggagaaactatgcctgccaccctttgtatgtgtgaggaggctgaggcactagatagataatgcaatagcagagtcacagctcagacttggagacaggtggtagcatcttggggataaacttttacatagggctcccactttgtgtatctgatgccattctgcaagtccccaggtagggactgaaatccattcctctcggcccttatcagagggtgccattatcaggattgagttcctactgtttcaggtctccctgtacttgtcttctgacatcaaggtagaataaaaaaaaaaaagaccatttccaatgaatacccattatatcagagattatgccacacgtgtcacaagaaagccagccagtctgtcactgagacagactggtccattacacaacctttatacccaagacatttccaatgtttgacctatgtgaattttactaaaatgttccactttcaatgtacaaatttatatttgtaaattgtttgataaaatgtatcatacgatagcctaaaaatatcaattcaaaatcaccttgattactgactggggagatagtctcctgaattcttcagggagggctcatcttttatatcaacctggccagtctacagagcccagtagttggggccaatactaatttaatcttgtcatagttgtatgtctataatcatagcagctaggagactaacaggggactatatagcaagtttgaggccagcctgagtgaagtctgaaaacctatttccaaaaacaaaaccaaacaaatgaagacaaagcaacatccaaaaattaacatcctaaatatcaactaaaacaaaacaaaacaaaaatcttctaatgcaggtgttgtgaaagttattttctagacattatcaacatttacatcagcatctgtcatgcccattcttttggccctgcaatacaaccatttcatctgcaaaatttaggcttgcaaacttcgtttgtaataagtctacaattttgtgtcaggctgcctccatagccatttttggctctgtgcagcctgaggttagagttagaccagaaaggcaatgattttccataatgtaagtgggtctcatccatgaattgaaggcgtttggagcaaagattgatatttgcaaaagaaataatattctgccttaagccggtatcacagaaaaacctcagagcttctggcctttggaagactttggagtcaagactgtaacatccatgcttatcagaactgcccaccagcctgctctacaggctttgaacttagtaacatccccacactaccattaatgaaccaattccttttaaaaatatctttcatcctgtccaaccctccatctttccccagctcatgcaaagtgggtagtttccaaagagcataaatagaactaccttctaatgctctttaaaaatgaaccctactttaaattgtttttatttttatttcatgtgcatgggtatttcacctgccatgtatttctatcacctgagtgtagtaacaaggaggccagaagagggagtcagactccttggaacaggagttataggcagctgggggctgccctgtgggtgctgagaattgaagctgggttctctgtaggatcagccggtgttcttgactgctgagtcatgtctccagccccagctctggtttttgtaggtacttacaagtgtttggcaggttgtgaacagagctactctggggtctatcatcttctgttcaacagtactgagacaaagcaactgtattctttctggagagagagaactattggctctgtgtttctggacgactataaggaccccagcatctttctgtcattacctctcatgttggtggctgaagcagggaggcgtacagattccacctccatcatgatttcccagttgttcctgtgggggaagatgtagtggctacttcctgtgacaattcaaaagcaatgatctatctctctagaactatttgttagtctcttcctgctcccagggctcatggcaatagatttgaatccccatgccctctgggaacgactgtggtttgatggctacaaagacacaagttctggtctgtggatgtacccaaacagggctcctgggaccacaattgcactgttcaagagtgtttagcccagtcctgttctgcttacattgtggccttctgtgttttctggggcagccagaaggacatgaaggggcagttcagctgacagatggcattttgataaccttttccttccaatatgaagagaactacgtcacttccttgatggctcctgtcttccatctgtatcctggtttgattgttacactctcattttccttgctagcaaggatcacaggtcccagaggtaagccccagtaggggagtacttgtttccttaagagaagcctcctcctttccttccctccccttctctccagcctatgctaagtacaagtctagtggcttgtaaagggtcagctgggaggctggggaccagggacaggtcacagcaggagaatccaccaaggcacagagctcctttccttgtggctggctgtaaacactgaagagtgtttatcatccacagttctgaatgtgccaacatggagaacagaggccacagcaagtatggaagcagtggggacgagaaaacagaagcagacattccagggtgtgtgtgggtgcatgtgcctccatccttttctctgcactgatggccccagggaggcagcagaacagggaactcactgttttccccccatcttcttccttttatcaaaccactccatccccacctttctatttcaggggctgaagtaggcagagttgtggaggagggagccattccctcctgaacttcaggtttcccttccagctgctcctgcatttgtgggggaggaaaggctagggctgccttgattctagcagttgatgaatgcctctcaggtcaatgtttactttaacaagagttcttttactgctgatctctctctctccctccctccctccctccctccnnnnnnnnnnaggaaggggggcatgaaaactgaagcttggaaaggatgactgtaatgtgtttatagaggttgacaggcaggctgggctcagagcatgtcagtgtccctctgctctgggtacctctgggtttaactgaagaaaagtcatttagttagaggacgttcaagaaatgatcaggttagggtgcagagacagctcagcagggaagtagaaccatgcttcaaaacacacacacacacacacacacacacacacacacacacacacacacacacacacacacacacacagagagagagagagagagagagagagnnnnnnnnnnnnnnnnnnnnnnnnnnnnnnnnnnnnnnnnnnnnnnnnnnnaatgaataggtggggggggggctggccagccggccagcctatagcatcagtaagttccaggtctttacaggccttgctaaaaagaaagcaggtgatcataataaatgacagccatggttgttctctgactttcacgtgtatactatgtgcaccccaccacaggagcgcatacatgcatgtgcccctcctccaggccagcgttctgcctacagacaccatcatagccctggggcacactaacctcacacgtttctcccatgttccaagaagaaataaaacccctcttgctgcaacaagaaggaaagcaaatccatttaagaacagtgaccatcagaaatggtcactaaaaaaagacttgtgcacccttccagcgactctgtggagtgcagactggtggatggtggtccaccgaagagattacctttcacagagcccctgtatccaaaacctttttttttttccttcaagaatgtgggcagaaagggtgcatgccacctccaggattggcacacaaagacctccaacaagactcccctcagatcctctagaccctctttgttcccaaacatcagctggaagccccaaatcccaagattccctccgccaccccccaggagctgctagaaaaggagctgtgttgccgtgaaatgcccaaatttcatggttgcatgagagaaaaataaactgatacaataaaacactggggttttagtgtttctctgtaacaaaagttattttaactgtgcaagatcaatacacagtttcagaagaaaatgatcaattagaccgagtgacacagaccttaagcatgatatgcttgtgttgtattttctttaaagcatatgcctacaaatacatttatagtcttgggacgttgctggcagaagcacaagaggacccttggttgcctagagggaaagaaactgaaaaatgggaaggacaggatatggtttgtatacaagtgtgcatgtgtgttagtgtatataagcatgttgagaaacacatgtataggcacatatgtgtaggttgacagacacctatggacatcacttctcaggtgatggtcccccccctttcttttcttttctttctttctttctttttttttggagaaaggccaatgtctgtcactggcctggaactcattaagtggagcctggccatggagccctagggaggaagttgtctcttctccccagtgctgggattatagccacacaccatcgccaagcttatttaatgtgggtttccagattcaactcaagttctggtacttgtacagtgaccactttatggattgggctatcccctgtcccccaatactgttgttaaccttgtgaatttgttctgtgagcatgtattacttactcataaattacatgcagaaaacacaaattttgagagaacccggtttgcattgagagaattcttgcagacattgttggtccccggggtctcttttaaaagccaatggtacagagtgttgacttttaaaaatacataaaactgtacttttctggaaaactcaagggagtcagcacagctgtgggacaagtgctctcatccttccaggggctctgtctagtgctgacaggaggccccccacctgattatccctaaatgtgagtccatgtgttcacaagtagatctttcagaaaagggagctctaagctggagagatggctcagcaagtaaaggttcttctcaccaagtctaacaacctaattccatcacttagacccacatggtgaagaagactgactcccacagctatctgttatagcctatatttgcgcgcacacacacacacacacacacacacacacacacacacacaattaataaatggatgtgattgatttttttaagtaaaagagactccatagacctctttcttcctaagagtcctgatttgaaggcaaagcccaggaaaacatcctgttaccagtgtctgggaagagccctcttctcattagaactgagtaccacaggctcccagaaacactgctttttcctaacattttaaacactggatagagatgagagattgacctctaaaacccaagtgtgtttggggacaattcttggaaagatgggtggatgtctcagcacaaagataccatgtgcaagtagcgacatgatcacatttactattataagctggtgcactttggattgggactttatgttttgaaatccattttatcaaaaagactaaattttaaaaagaaagacaggggttggaacataccagtgtttccatggaaagcttcaagaaggattcctgatgcattgctaagtatttggtagcgagttcacatgggtgggaacctccattcaccatagctgttcccagaatcacacaaggaataagttacaaggcaagtgccacaggtaggctcagtggctggaacaatggcatcttaacacagggacagacaagaatggcagataccccatgggtgatcacttttcagaccaggggtggctgtggagatgcacttcacaagagaagtggcttgagaagtctagggtggccaacgagttgcacccttatctctgaaaacactaacaccatttggccaaatgctattcaaatcctgcccctctctgtaaatgaaacaagtgcttcatataattttctctaaatcaattttccaaacacacagaggggaactatagaggtctgacttacttggaaataacacaattagctactaaagacttaggatgacttgccaagttcccaggacccccaggacactgtgtggaattggtggagcctggatgaaggaagtgacatagctgcagggcatgcccttgaagggaacactcagacccagcccagtcctctttctcttcgctcatttggtccccaaacagaaagaaggcatcctctgccacataacttttttgttctcctggcagagtctcatcctctgttgggcagctggtctaccacatacttctgccataatgcgttgtgctaccataggcctagaacaacatgaccatgaccatggactaaatgctctgaagccatgagccagaaccaacctttcctctcaactagttatttgtctcaggtgctttgtcacagtgatgggaagatgactgacacagggcaggaggaggagaaagttagtatcacatatagtttaaggtacctatttcatggcaaccatacttttgtagacacacacacacacacacacacacacacacacacacacacacacacaaaagatgtctacaaaaatttcctgccttaaactccagtaggaagaaacaagctaaaatatttaaagccctacacacactgaaataataatacaatgatggtttactggtggtgatgcaagctatggagaaaaccaacatgtttctctattgctgtgatgaaacaccatgaccaaggaagcatttaatttggcgctcacatcccagaaggttggagtccatcaccaccatggcagggagcatggcagcatgcaggcaggagccataggctgagagcttgcaacttggtccataaagacaaggtataatagagtcaactaggaatggcctggacttttgaaacctcaaagcttacccccaaagatatattcttccaacaaggccacacctcctaatcctttccaaagagttccaccaactgtggactaagcattcaaatatatgagcccatggaaatcattctcattcaaagtaccacacacattctagagttggtttcactttaaagcagattggtaaaggctgtactaagaaggtgactgattagtgaaggggagaggtgcgctggacaaatgctcagcacagtgccaccaggaagtgcaaagaccctgtggtaggtaggaggcaagggtgggagtgtgagtgagttagagatgggggaggacacagggtgttatgtgggggcatcacactgtgtacagcctttgagttatggggagggcctggttattctcgagtgaagtgagaagcagatgaaacaccatgctacaattcatgggcagtgagtggggacagagaagaaggacagaggtaggaagactgtagtgtgattctaacaatgttgaggcaagccctggtaagtgcatggcatggaatggccatttttgctactgtctgaagttagagctgaagagacttggtgactcagacacagaatgtgagagaatggtgaaaaggatgcccccatatctgaggaaggaagcttaaaggggtggtatggctaaatagcaagtcggagctcggggacaagaaggactttctggctgagggaacacagggaaaagatgtagcactaacatgtggctgcgtgtgaccatgccctccccacagaccctgagggttttctgaggctgggggcatggtgaacagacattgaagaggctgggctggagccagaaagatggcctggggaaggctctgtgtagcacacagtggcatggagacagagtgagtgagggatggggagccatgaggcctaagtgagagaaccaaggggaggcgtgggtgaggatggacttccctgtcagagccatccttctgggcacactacagggaccttgtgaagagaatggatgagaacagagtgtggcaggcccacaagagatgcttggcgagtttctcaaatatcttaaaagtgaaccctgatatttcctattgaaaatctttaagattattgttagattctcatttatttgtttgcttgtttgttgtttgaaacagggtctctctattatgtagctctgtctgtcctggaactccctatgtagatgaggctggcctgaaacatacagagatcctcctgcctctgcctcccaagtgctgggattgaagttgtgcacccacacccagcaattgttagtatttttaaatctaaatactcgtctgtaaaagcattcaacttaaatcataaattttctgtctatcttttgggggagacaaggatttttaggagcacaggccacagaattgaggttaacatgatctattgcatttctccccatcccctcctttctgatggccatctcccacaaatttgtaaattcactcccccactctccttcccaggcacacagcatgccatttgctgttcttatcatgaagctgcctgattccaaatagcttacccatgttaccctgtatatggggaggcatcccaggctcctgtgaaagtagctaactgggaaatacatcgccaactttggccaatggggagcagagaaagagcagatctgggggttctcagcactcacttctctgcaaagctggaactcacacaggacatggcagatggagcttctgctgtcctggagccctgagtgaacaggcagaggacaccactgatctcccgaagacctgctttggaaatgtggatgctgttgtttaaagccagcggaagggaggtgactgcatgtttcctgatgaataaaaagcaatcggttcattatctcttccagttggaacactgaacctgccatctgtacaactttagagatgtcgcctaatccatctgagctccgtctcgtcccctgtcaaatgggccaatgatgtctgacctgtctaacatctcaggacatgtaaggatgcaatgagatctcctggaagtggctgtgatctcaaatcacagctgcagatgtaaaatattcattctattgttatgtgtggagactcaaattgtggctgtagatggttaactcttgctctgttgctggatggaaggttatttaaattgcttcctcgttcactcagtcattagaactcatcaggttggagttggagagatggtttagtggttaagagcactgactgctcttccagaggaccctggttcaattcccagcacccacatggcagctcacaactgtaactccagttcttgtggaccaatatccatggcaaaaaaatttaaaaatgcacattaaaaaaaagaacttattgcctcatggttctacaaaagccatgtgacacattcaagtgatggaccacttggagaatcgtgtttcttttaaaatgccagggctagaagaatggttttggagcctcacccccgaccatttacctttggcatagaaagtaaagggaaatcgaggcccagaatggaaggcttggcactgaatgcttccctcctcctgaggcttgtcagtaaagagagggaggaatagaggggccgagacattccagcctctacccttatgcagaccaaagcaacacacattcagaagggtgcaacaaacctattcagatgtcactccaggaaaaacggataaggaagagatggtttccatccacaggacatatggaaggcaggcaggaaaaggcctgtgcattccacactctgcttctaactcagaagaagggctccctgacccattgagcagctggcagcacaacacagacggatttgtccctgggacattttcatccacctgtttagataagcagacattacagctgaccctttttccaggtactgactaaatgtcaagtacttgacattttatgtatcaaggagctgaaacacagcaaggctatgtaatcgcctgaggtcacccagctggaatgaagagagagagagtcagtcattctagtcccaaactattcaccactgtttctaaggaggggacagaaacaagaaagtgggaagcaaccctactacatgctctgaagtggggtttagatacaccaccttgctgtgttcttaggttctacaatgagcagtagcctcaccctgtttcacaggtacattaacagactcagagaggctgattaatgtgtccaaagtcacaaagccaaaaagtaacaatgggacctagaagtcacatgctttccattcggggatgaggattggggtttgatccctaggacccatgaaagacagtcatggtacatgcttgaactccttctgctgagtcagacagatagatgggtccctataggacttgttcctatagagtcagtctagcccacttgtcaagtcccatgtcaatgacttcttttgactctgtctcaaaacaaaaaccatagggagggtgcaggaggaatgacagctgaggttcatttctggtttctacatgcatgtacacatatgtatatacccacacagatacgcatgcctccctacccaaaagttgacagatccagcctgaatgctagacacagtggagagttttatagctaaaaagtaggtaacacactggaagacaaatgtcacgcaatttcaattttatgtgtaacttagaaatgatgaacttatggaaacagagagcagaattgtggctattaggcttcattgtgggtcttttaacaatggggaaacgattggtttaaggatataaacctgcagttggacaagagtcatggactctgtgatgtcttgaggtctactgagagcatgataaatatggttgataacaatatgctatattttaaaagttgtgagatagtatactttaagtgttctcaaaacaaaaacgatgaatatgtgtgatataacatgttaattggtttaatttagccatgccattgtgaacatactgtattctgtatcataattgtacatgactttatttatgagctaaataaatgaatggaaaaaaaataggtaagccttttggggagaaaacaaaatgcattcaggaaagagggaaagatatcaggaaaatttctgtgctctctgcaaaaaccttgtgaacttagccagatgggcattcttgttgtctgtcttcctatcctctcacaccgcatcatataatcacacacttccacatttcttaaacttaagaatcaccgaataatctccagtgttttttttttttttccaacatttgctaatccacagctagaatgttcccccaacctgaagctagagaggagccatgcaattatgacacaggagccagacaatctcattaacatatccgtgactgacacagcggatcattaattaggcattccaagcataagtatatatgtataaattagcatctattcaccatttaaactgtaagtgatttttcatatctgaatattaactatgttggaaaattactaagtttttctgagtgaattccacaaacaatacccacccctgatatcaagaacaaaatgcagagaagagattctatgaacggaactggactgggagagaaccaaatgacgtcactgctcctcatctactgggaccttcctggctctgcttcctgtttcgtgtacttgcaattattctctgtgccaggagctacaagtgaccctttaactgtggtcagccctcaggtataaagttgttgcaaacattctggagatgccctgcctatgtctatagattgtcattgttcacttgctctttctacacgtttattgtgtgtgagctgtggatagtggaggaagtgagtacacagaaatattgtaagttggacctttgagaacttggttgtctatttggcggggaagctgagaacacatgtggacagtgaccgctgtctaagttcaagagcacctcagaggaggaacagaccctgctggcagtgggagaggcctgaggaatggctgtgaaagaggtggcacttccagttgggtggttggcgtggatctggccaagtttgggtatgtaaagtatcatgtagttgggaaagcacagcaaagccaaggtctcacattatatctagtctccaactgtgtgacttctgaagccaatagagccctccaagtttcaacactgctgacaaacttatcccttcagggtttgaaaactaccagccccaggataacaataacagtatgctatcatccttcccacgtgtgacaaggacagtacctacactaaacagcttatgtgggtacctactttccttgtggtagtcttggattcatgctagcagactcattgttccacactgaattttcttgtgaccagtggcacacattgaggatgtggctgtcctcaatgacggctggacttagcagctgagtccatcctgcacaggaagagcttactagtttgtgtggagactgcaccctacatcctgggcttaccaccctttcggttctactgaagcatctctttctctggtcataccaatgcattttagcccagtctcttcttttaagtaggcagcctggaaacaggctagacctgagaacttctccagttctgacatctatgtataaaaatcactcatagatccagactcctgaagagtcaggagcaatgggccttttcttgtcagtctatgacatatcagactgagcaaaatttgggagcagaaactcctaggcccttagttcttgagatgccctggagtggactgaagaccatctccttttctctggacactgttatgacagaggtcacagctgctagccatgtcggatggatagcaagtgcattcccagaataacaaccaaggctctcctaggtaggggttggagtcttccccactttggaaattggcagtttctgaggccttgacggaaacaaacagcttgccaacaaatggcgtaatctaggagaacaccagctattactgaggaaagaaccatctagaatcaggctgcttatttcttctatgctctcagctaaataaatatcgatctcctacttgtgaggtcaattcatgtgtagcaatacaaacgttccattttagtgggatgagaagtatctctgtccatgaatactcatgatttaagcagtacagtgattcttgatgtctggactactgtggggaataacaattagttaattggaaagctgttcattaagatggtgctctgtactcgaccctgtgcctgacatgcagcagacacaaacagcttagacagcagaggatgccatttggttaaagagacccaggggggtccaaggccatgttagtcctaggaattcagaggaaaacaaatcaagagggatccaaggtcatttcaaggagcttgtttggagagaagattcggacttaggtctcacagataaagaggatttaaatgaccctcatgatagagacaaagcacaaatattagaaaatgcacagaggaaaggaatctgaattaggtaacctgaataaaaatgtcttaaattcaattattcatagaaataatatgcacatcttgtcctgtactctgctgacatggactagttttaagaggtaattgggtgggccagggatgtagcttggttggcagagtgtttgggtagcatgaaggaagccctgggttagactcttagcaccacacaaatcctccggtatggtggttcatgcctaaaatctcagcacttgggataaatcaggagagtcaggagttcaaggtcatccctagccacatggcaattttgagagtagcctgagctgctgagtagcctaggggacgaggagggatatcagttttagtttcagttcctgttcctatcccattactatcatttaaaaatggacaaagctttccccacggtggcctctgacaaaaaaataaaataaattaaaaaaataaaagaggccctggatttttatgcctgagttcctctgttgtactaagggctgcctggtaaggctgcacacaaagagatcttctgaggccaacctatggagacacgttccaatttaggctgtggaatgaaaattacagggcagacacagaggcaagtttaaaattaggacaaacttcactttgggcttcttaagtctcaaagagttagtagatgaggcaaagaaaaatggaaggaaaaaaatctgtaagaacttgaaaagcaaaatcccccaacctctcttcttttctacagtccccagcattcctgagctttcggaacacttggtaagcagtggaaagggctttttcagtccctctgctgcttcatgggggacactactcaaggcaccaccaatgaggagagcctggagatacagaggtctggaaaatcctggcttggaaggaataagaatggcagtgaggtagaccttacctagcccaagcccgttctctcccttaagtcctaatactcagtgcaggttggtgatggtggcttggttctatgtgtagacacagtcatcagtcaatctcaaggcagaggcagatgacagtcttgccaggcacatgaagccttctgcaggagcgctgaaatcacaagtcctgttccccagagagtctggggtgcgagggtaactaataggactcctctggacacttgcagctaatgagcaaccactgtcctccctacagggatgggttctcaggaatgactcaaatgacccaggaaaccaaactgcactttctctttgctccttcagtctcacttgttcctccaagctgggacagaatcacctacacttcgtttctcttgagaccactttgatttgggtgctgccgttgtaaaaggtcataatgaaacccattattttgcatgctaagaaagatgttttaaaatgattgttcttcacctatccccaactaaaagttgcaactttaaggaaatcaacaatccccaaactgaattatttctactattgcatgaaaagatgtttgtcacctgacactgcgtttttaggaagctctagggactgcagacacaaaccccaatagtcaatattcagttagattatcctgaagggactacaagagtctgaatgggaaggagccagtcacatgccaccctttttgcaaagccccacaatgggtctgtcacgcctccctccccccaccccacccccgtcttccaaaatcagttccaaaatcactccctgaggagaactgcctcagaagagtatgtttccagatgcacattcccaagagctaggaataaataaaacatggggaatggtagctttcatgtgtgattcccagtgacagcctgaagcccaggtgccaggctggttgcaggagtacccacatgttctgtctgtctgtctgtctatcagagctttaagtgaacaggaagaggaacaagtctacaagtggagggtattacactcctaaacaccttcaccccgtaagtcaagaagtcaagagtttcaccagaggaatttactcatgggagctgggcatgttaagcctccatcattttagtccagcgtggtgttaataagcagagtcattctctcagggcacctcttcaacaggtgttgcctttcggatccacaactcactttgtcagagtgatttcagcactgcttggagcacaacgaattccgaaacttgatcccattgaaatatttagtgcctgctgatatgttcaaacaaattctccagatcttgattatgttctggcaattaaagctattaagtcagtagacagacagcgggttatttcattgctggttgaaaaagccagcgttctcccccccccccacacctcttatgtgacagaactgtaattagccttaatcaaatactatttgtgctctgtgcagtaacgttgcttccttagccaggaaacactgccaatctaggaaaaggagaaatatgaccctggtcagaaagcaagaaagataggcatggggtgtctgggaacgttttgttctatcttttctatgttcttgtaaatctaaggatgttgtacaataaaaaatttaatttaaaaacgccgcagggtgcagggtcagtagtgtagctcagtggtagaacttgtggcttaacatatgtagggcactcggttctactctgtgagtgtgtgtgtgtgtgtgtgtgtgtgtgtgtgtgtgtgtgtgtgtttaacagggtctcatgaagcctatctaggctggcctggaactcattatgcagctgaggctgaactctgaagtatgagggttacacaagtgtgctaccacatcagcaaaataataaatgcatttttaagttttaagttatttaattaaaagtataaaagaggtgagaataaaggaaggagaaaggaatgctgcttagtataactttgacgtttagagctaacatgtcaaagacagccttggaaatcattcagaaaatatggtcacttctgaggttcactgtcttgccacattggggacactcaaatgcttcatagtcctcactgcaaataagtttgtaaatgactggaaggaaggacaatgccccaaacagagctgattctttcacatggatcccaacttctagttcatttctctgtgtaagctaaacatcccgtttatttaaatatctccagaaggaggagtttgtcttggagaacgatgctgatgaacaggtgaggggagggagtggcggtgcttttaaaatcttactgtgcacacaaatcacctagggatctagtgaaagggtgtacatctagcgcagccttcaaggtttgtctgctgcaaaggcctagttgacattgaagctgggccattctttgagtaccaatactgctaggaccagacatcacagaagtacagacagacagaagaccttaaatagtttgtctaaaaggttgacagtgagaaatctggccaagtctgccaaccaagagatacacacttgtattttcttcagctaataattgctggtatcaaattttcaaaacatggtagtaaaaaaagcaatatgttatgaggcagactgtctgtgagctcagagcatcccaatgatagcagaaactctattcttgcccaaagtgccccagctgcaatagggagcaagcagggacaatttgaaaagcagcagtatgaccttcgttattattttgtctatttgtctcttcacacctcaaacagttttgtatttgtggaacattatctattggaactggggttttgttttttaaacattcctagaaaaagaatcccaggggtttccttccaatatgttttagtctggctttgtaaactatggtatcagctgatgctgtttatgagatcaaactgctaacattggaaggatgggaacacattaatctgccattttctacatctttgagttgcatgtggggtatgggggtgtgttacactgtttatccttcctctaagactgacagtcttcccaacattgtggtcattggtgattcaaatctatcatgtgaccatgactcatcactacagtcagaaaccagacagtaactttgagcctgacctacaaagctggcatttgctttgttttgagattagttgaggatggggagctcatcagttggaatattcctattcaccactatgtcatagcctggaaagatggcagagggacaagaaccagcgacactaggagattaaggatgactcttactctcccccagaagaactatatcattgtaggagatgatcatatgtaagttccagagaaagctgaaagaagatgggggaccatcctgtcatatggttgatacttagccgacaaagatgaatcacctcgctccatccaacatggcaagaccaggtgatttgtgacttcgaacaccaggaaacaatccttgcaagtcatcgacatgactgtggttgctgcctcaaataccacattgctagttctccttgcccgggtttttaagccttggaacccggttataaaatggcaagcaatggtttttctgcttagattcttgtacatcttaataaatgcaacagacttgggctttgaaaaaacagcaagtcctggcgtgtagctgttgtcaatttgagggtaggaattcctccaccacagtttatttcaagtccaaacctggctggccttactgaacacagaatgggaaagaaacatatatagtgacaaactgaacaggatggtattgttacaaagtaatagcaactgcctacaaggaaggaagaagcattggcttttgtttgtgtgggagtttgtgtgttgttccctaggaagcatccatgtatttctgacacagggtctctcactaggtcctagggctacccaatgaggtgaagctgacaagcccttgagccccagggatccaccaggtctctccctcccagtactgggataagttttacagtcttttgtctggttccaggggcttacacacctcatgcttatatagcaagcacttgctcaactgagccctctccagagcagcaacagtgtcttaataattaagttcataacaatttaggagggtaaaagcattttaagttcaggatagcatgcctctttttaaatattttcattttgttgatgaaaagtagaagcctgtaagcccgtaagcccttctgtttttatacactcatcttaaatgacaacctcgcatgtataaccagcacagaatcttataaagtaagccatttgaatcataatgagataaacacacagcaagaatttttctacatgagcttgagcattgaactttctacctaggtgctttgctcatcacagtgtgtcctggtgtgaaccctaaggctccagtcaatcaaccccagtggtctcagaatccacagagagggctaaggcatcaccccattacttactgttccctacaagtgcctctgatggcagcttaccacctttatgtcttgcctatatctcagctgatttgctttgaatagaaaaaaagtgatcttagggcagagaagatggatcaatcaggaaagcacttgccatgggagcatgggagacaggattttgacctcagcactttcatgaaaacagccagtcatagtggctcacacttaaaatcccaggactaggaaggaggaatccaagggctggccattggtgtgggaatccatttcaaaagaagggggacagctcctgaagatggagacccaagattatccactgggacacacacacacacacacacacacacacacacacacaccatacacacacacacatacacacacacaccacatatacacacacatgtacacacatacacgcatacacatacacacatgcataccacacaccacacataacatacacaccacacacatatacacacaggcaagcacacacatgccccacaatgatttcatataaaaggacactagaatgggaatttatgtaagattctaaggttggtatatttttctacagctattgaatataatactgacctcttacccctttacttaatttcactctacctttgtttctcctatgtttccctgcttattaatggagaggaacttttaagagtctaaacactaagggactagagctcacaggcaggggaagggagaacccagtgatgtatttaatttgaagaaaaacaactgcatcatgactgtactcatgtctctcccccacaagccaaagccacacaaacaaaaagctaccaccactcagccagtacctccaacacaaatgacccagttaacatgcaaaaatactgcttgaaacacaatgaaaggacaccactccaaactgttgcttcacatcaggccctaattgcttgtccttgctggatcggcctttgaaccttcacaattttgtgtaccatcataatcctgtgtagctataaattcttcacaggtggcactatcttctaacgtcttcctaagttttgaacttgtcattttcactgaggatgatggcctttctgataaatgcctaagagtataagacatagactgtgcagcagcccctccctcaactttgcccaggtgcaggacaccagaaacacttgagcatttttggtgttagaatgatggtggaagtcagcccaccgaggcagaacgggcagaatgtgcacctgcttttgcctttctcaggatgcatttaaattccccagcttcatcaccaggtgtcagggttattaataggatggttgatggctcgggttgctgaatcttctagacacaggaatggtgcccaccatccctagtgtttcataccaatgcccggcattactgcctaatctgcagctcagccacagacagcagatgtcttacttatttttagtctgtctgtctatctatctatctatctatctatctatctatctatctatctatccatccatccaaccatccatccatccatctatttattcggtgtggttgggggagagggaggtaacacgcccatggaggtcagagacaacattcttaagttggtttcctctttccaccatgtggattttcagaatggaactcaggtcctcaggcctggcaccctttacctactgagcaattttactgacctgtttggttgtttttaattttaactttagtgtgtgtgtgtgtgtgtgtgtgtgtgtgtgtgtgtgtgtgtgtgtgtgtgtgtttgtgtgtgttcacacacagattggctcagtaagtactttacccattgagccatttccccagccctgtttggttttactttacagtgaagtatggcagctttattttcactaaattaatatataggtagttctgtttttaggattttttccctttttctacaagagttttactctaagtcaaagtctcttgctttttcaggctttaaaaacataactacatggtgctgggtagatggctcattggttaagagcattagctactcttccagaggtcctgagttgattcccagcaactacatggtgacctataaccatctctagtgcgatctaatgccctcttctggcataaagacatacatgctgatcgagcactcacataatgaaataaataagtcttaacaacagcaacaaaccagacatacatataggagagataaattattcataatactggatcttctggaatgatcacagtaagaccccaggttctcacagctcctggacatatgccgaagtcacacccagagatttaaaaagagccatggataataatgatctatttgagacatagatatagatacaatataaccgtgggtggacacctgtggatatagtccaataaattcaaagtattttaaccattacagataaatttaataaacttaagctcaaagtaacagcaaaaaaaaccccactaatatcaagatggaacaaatgataaaactgcattaatcacaaaaaaacgacagctcttcccagatattatgggttcgtcaccattcagtaaaaaaggggagaaagcgacagttgcaggtgtttagtgtccctggaaaaagattatagcacagtctgtggtctgtcactgtctgcctcttcccgggggcctgtcctgtgggtggcatttaagaaacaggagaaggaagaagattgaaaatcatgataacaacaaaatataaccttagctggtcttggtctgagcctgtaatcctagtctccacaggatgctgaagcaaggggaccaaggtcaagttctgtctgcattagagtgagctgaaggccagactgagcaacttggtgagaacctgtcttaaaataaaaggtaaaaataaaaagtggctcgttggtagcatgtgcaggccccagatttgttccccagtactgaaaatcctactaataaaacaaaaatagagcctgactctatatccctgaaatgtagaagatatgaaaaacaaaagcaataagccctctgtgtgtctagtatgtgtgaacctgtatgagtgcgagcatgcacacgccaagttgctcacataggagtctggggacaaccttggagttaatcctggcaatccactttttttgaggctgggtctcttattgttcgctgctgcgtttgtcaggctagctggtcagaactgccacaattcaccctttgtgccccatctcacctaaggaatgctgggattacaccacgtgctactgcgtatggcatttggggattctgggaatctaaacccaggtgctcctaataatgcagcatgttatccacctcgccttctctcctcagcccctgaggatatgtatgcctttgagaaaataatggaaaaagtcaagtcggctttctttttaagaaacacacatacgcaatttttcatgcagacatttttctcaaaggagttcctccatctcgaaggttgtgagctacatcaggcaatgagagacagagcatcctaccagatccaaagagttcctgaaggcctttaacagtgaaatcacttagcaaaacacagatgcaagccaattacaaaatcacagtgtcttcaagattggctgcaggctggcactggcttgaagctggctatcccatccacctgaggggaggggaaggggacttgacttccatcattcctgggctacattcagacctcactcttttccatacttgtgtctaaatttaccccattcccaagagaaacacacagcatcacatgagttttgagtcacttttggggtatccatctgtatgaacccatggagctgaggtacaggagatggctgaatgagcaaagtgcttgttgtacagccggaggacccaagtttgaatccccagagcctatataaagctgggcatgtagtgcacttttgtaatcccagtgtgtctatggagagatgggaggagacaggagaacccatagaagctcactggccaggttcctggcaaccaatgaagcagagagcctgtgtcaaagtggacctatacccgaggttgtcttttgacctccgcaaatgcacacaccatcgtataaactcacacttctggcccggcggtggtggcgcacgcctttagtcacagcactcgggaggcagaggcagggggatgtctgtgagttcgagatcagcctggtctacaagagctagttccaggacagcctccaaagccacagagaaaccttgtttcaaaaaacaaaacaaacaaacaaaaaaacaaaaaaccccacacttccgaccccacatacacacagagagatatccaaacctggttcaggtcaacaccactgtggatgaaacctaaattacagctactttatctcaacaccggtttgtccttgaggcaagaaggctctgaatcaagtaccataaactgagcttctgagcagccgacagcaagaccagcacagagcctaagccagtggaacacattcaagtgactgtgaactggattagacagaaacataaaaggaaaacagagcatgatggcatattcctgttatcctgtgttgggaggcagagggaagaagctggtgaagtccaaggtctgcttgagctgtgttgtgagttgagttcaaggtcagattgaataacagctgaaagaaaagactgagagtagagagttcagtggtagagtgctcgcctggcactcaggaagccctagtttcagtcatgaatacacagagaggaaagctgtaaagaggcaaagaaaggagtagtgggggaggaaagagaaagaaccaggtacctggatgctcacagagagggtgagaaaaacccagtaatagagtggggctggtagaacaagccaatgggaagtctcttgtgatgttcctgaggctgacagcttagaccatgataaacaagggcctgaatacacaggaagaagccatgtgagtgtagaggagggaagacttaccccttccgcccactcccaaccttccagaacctgccagaaaatgctagaacaatcagatgcttgaataagcgcctcccataggtaggcagatgtgtgtgtgtgtgtgtgtgtgtgtgtgtgagagagagagagagagagggaaggagagaatgtgtgtgttaaaatactgaagcctgaaccagtaattcctcttttttactctgggctcccctttagtctccccacatttttgcatcagggtgctatacttcgaaaaatgaacacacacacaatcttctttcagcattcttttgtcaagggtctttataagcatgagggatttctacattccataatttataacaaacttttcatctgggcattaaaacgaaggcctctggaaagctccctgacgacgcttcatctggcaatggtaccatatttctgtagcagaacttgaaacacagactttatgttaatacgctttaatctttacttcttacatttcaacttaaccttcctcaaaggaaatggcttccagaatcctcttcaagtattcatatggtctattgtggacactacagaaaacactctccatgtaacatccatttcctgactccttcctcagccttcagcctccagcagaggtgggaatcaggacaatactagccattctgtaccactggctcacagagatgtactcccaaggcaagcagatgttggagggatgcatacaggggatggactggaatgtctgatcttgaagtaagcaaaaagaaatcaagtttgtgaacttgatatcatcctcagaccgaggatgacatccaaaaggatttgatgcagagttttaaaataaatattgttacacttttatttatttattctgcgtgtgtatgtggggaacatgccacagtgcccacatggagtcaattttctcctggtaccgtgtgggacccagaggttgaactgaggtccccggattagaaactcttttaccctctgagcatctcaaagacccaagatcttttttttattaatcatctgagagaagaatgatggattaagagagatagagttccctgcaaatatatgagggcatttacaaacaccaaccatagtggtagcagaatacatttattatcagagaaactacaaatggatattgcaaaatatatagagaatccaccattaagttgaagtgggagaatctgagcaggcttcatgggagaaatggcatttaagataggctttgaatgaatgaattaggttttagtagatggagaatgagcaagaaagaaatgtttgaataattagaaggtaggagagtggatggatgtggagagtagctaccgcatgggagactcatagcagtaaggactctgggctgattgtgcagtctgtgaagagccacgtggtgcttctgaacatggaccagagtagcagggcagttgggaggatgcttaaattcaggaacttcacatgattttcttttcttcagataagaggctaaggtccatcaggaacctctgagcccagctaactggagacagagctggggatgttctctgactcctacgtaactccgacatataacttcattacagaaaattccgctgatccactaggtctcttttccatcacaagcaccttctgacctgggccttcctaactccatctccagaggctcagctattgctcggccattccactcctttagctttccagatgtggacaggaaatctcccagatcacagatgagcaaacaaaaagtctagcccattggcttattattattgttaatcagataccacctgactcaggctttgcaagctttgtagagctggacatgagctctacattttaggaacctaggagctggtttcccaatgcctgcatatatcagtgttcctttagagttctcagaagcagccacctcagactgggtaccttctgagctttctcctcgcattagtggcgcttcccacagagctgtgtctatgaacccacaccagttcactgggtctctctccatcagcaaccccagtgaccgtaaactaaacggcaagtgccctaagatgctcctcaccttaagtgagcagattccacttctaacacgtcaacgggccctcctattcttagaagcacagtgagcattttgtttgatggtgtcagtaatggtttgactatagcaaaaatactgagtgaacttcggggttcacgaatctcccaaattaaaaaacaaaacaaaaaaaacacaacaacaacaatgacacatggcaagagtggtggttcctgcctgaaattccagtactcagaaggctgaggctgaaggatcactctgagttcaaggacgcgttaggttagagcgaaaccctacctaaccacgctcccacaaaatagtgcagtgacgtgtaatatacctcctgtttcacaatagcataaatatgaatgagtgtgcgagcctcttcagccctgttagatatgagaggcttgtactcttgaaaccatttttttttctcatttctacacagcaacttcagtctaaacctagcctgtctgaacctttaatgtgccccatgttttcttttgttgtggttaagaacactttttcccttcttgcttagctttttttcccttctgtctccagaactagaacttggctttctttgtggacgcccatttctgatgaagatagcatgtctttatcacaccatgaaaatgacctcaccctgggatgggtaagtaacataatgacttgggtggtggggtaattggcagtgggcttggctcattcacttggtaactcatgccagcttgtaaatctaaaatccaaatttctccattggaaaagctgcaaatttctttccatcccggacacttgaggttttttgtttgtctggttgtttttatggtttgcatgtatgtgctagaatgtgttggtgcacaggtatgaacatgtgtgcagaggccagcagtcaacctcgggtgttgttccttaggaggcacctgcattgtttttttaggcagaagctctcactggcttggaactcaacaagcgcttaagatagctggccagtaaactccagggatctgtctgtcccttcttccccagtcctgggatgacaagtatgtataaccatgcctggttttggtggcgggggggggggtcttaaatattcttattgtattttatctatttattcatttgttgtatgttgaggggttggtgggttggtgttgggggccatagtatatacaccagaggtcagaggtcagaagagtccattctctcctagtactatgtgggacaaagggatcaaactcaagctgtcaggcttggtggaagatgccctttacccattgagctacctcagcagcctgtttttggtgtcttcaaatacacaaaatactacatctgaaaacaacaaagatccattcaggaataaaacaaaaaaaaatccttcgcttgaaagccacactgataacatactaaggtttatgacaaaatgatgtccagtccattgctcaaaaggcttatggaattcaccacagaaatggccatcagaacaagtgtacagagcgcttgagaaagcagttctagcagctccaaagctacactttgttcctgccattggtctgttcatggtcccatggtcattgcatttgaccccttctgctttttccttgcccataaaactcatttagcacagtaaacaatgtgctaaaatgagagaactttgggggaagatgcagtgttctatatcataattgtggcagttgttacagaaatacattcattatctgaactttatagaatttttgcactaaaaaattagtgagttttgtctgagggtcaataatatctgaatgaagaaacatgaaatctgaagaaaatttccaaagtcatattgtatcctaagtatgaaaatacacatgcaaagcttttgacactcataaaggggagttttggatttagacatagatgtaccacaaaatgtgagagacttcctagaatatataatccaaatataagatatttcattttatctttcagataaaaacactatctggattgtctttcagccagactgtgtctgatgagttcatggacccttttctatttcggtctggatttgtgaccactagtattcatctgttacatgactaattggagtaagaggctagtgtgtagccataagtcaagctacttggctcatctgggtattttgccctttttaaaacagctgtaatcacaccatggtcagctaagtgagctggcttagtcatcaggccagacactgggtcactaacactggacctgaagagtgaatgtgttctcaaacaagcaggatttctccaacaagtcatttcaaacctcaggagctttgcttggctgcaggacatgcatagccagggcaaacggaattcactttccatactcttgtctgtggctttggtcgttataggagtcaagctcaaaacagtgcttagtttattggcaaagattaaaacagtgtctgggtggatctacactgtaaaggttccagataataccttcgtgtcttggaccagaaacttttggaagtctgttttgttaagcaagtatccctgggcctcagcatcactgttacttagagctgcactgtcaggtctgagcttatcagggcattaattagatctccagaaagggtggggtgtggacagcaacatccatgaacaatccaagttcatgcctgaagttaaaactactaattttccaaagaaacagctgaaaggaggcaattctgccatgagagcctttgcttatgggcaaagaatggaaggaaaaaaatcacttgctttcaatccaaactgctttgacaaatcctgctgaagcaccatgaacaacaacaaaataggtatatcatacagaaatatagaattacctctgtatcattttattggggtaaggggactagaaaagcacaactttttcattctttcacctaaccataattacaagcaaattcctcaaacccaaagtcaattcacatagaagtattttgcacggctttctgcatccagaatattgtgagttcaagatgttgttgacggattaaaagcctatcatgttcttttgaaaacaaactaaccaaaaattcaatttacttttacatttaattgaacttaataagtatctgttacttacataccattttaactataatcacagggattctgacaaatataagacatggcttcatctcttcatggccttctaatttcactgagaaagactataaacacattaaactagctgagcaactatgagcaatatcctagacctgactcagttttccgacttgtaaaatgaaagagtcaaaatagatgattcctgaatcctcccaggcttgcacaaatttttaaaactctgtgtgtgtgtgtgtgtgtgtgtgtgtgtgtgcgtgcgcgcgcgcgcgcgcgcgtgcacgcacacgcatgctcgagcactatatgaccaaaggacaatgctgggtgtcagtcttccacttccaccttgtttgagacagtctcctgtgcaccactgcatggggcaggctagctgtcctgtgaactttggggaatcctgtctctacctcccatgttgctgtaggaatgctgggatgacaaacatgtactactgtgtctgtctctgagtggcttctggggatcagaacacagatcctcacacttgtatggcaagcactttacctactggtccatctcttcagtccctacaaagcttttatctaatatttgcatgccctgcttaggaagcaatgtaacagtgtaaccattaagctcaaatatatcattaaaataatcaatacaacaagaagtctgaactgagagaaatcagccccaggatgtgacaaaggatacttggaaaagcagaaactttagcttggacttgtgggtagaatttggaggagcaatgggaggggccatccttcccttggaatgtagaagacttgctcagcaggactgaaatggttcttgagcaggaccaggaaaatcaagtttgtaattgcctctgggaatgaaagggtcacatgttgtcaagtggtggctttaaggaagggaaggcactcaatgacttgatgacacaatccttgtaccctataattcaggtcactcttctcaggccgtccagctgtatctcacctctcttagataaagactatgcccttgcaaggctctatatcaccttctccaactgtcccacacactctcatctgtctcttgcttttctccataccactcccctcagtccgatcctcagatacaaggcacacttaatggatttacacctgctttgttgaagtttggctactgaatttggctatgccttcctatacttgctcagaggtcactttcccagtctatttatttgcagtactagaagcagaatccagtctcatccatgctaggcgtgtgctctacgagcagcaccatatttaaaattgcagcccacactcatacacacacacacacacacacacacacacacacacacacacacacacgtttcaacatgctttatttttatttaatgtctaatcatattccttcatactctataatctatttgttttgtaaaatgtctatctccagtgtttaagtgaaatgatccctcttagaaaacagtgcaagacagctgtagtagtttgaatagatatggcccctacagactcatgtgtttgaatgctggtcccacagggagtgcactattaggaggtgtggccatattggaataggtgtggcctttttggaggaagtgtgtcactctggggatgggctctgaggtctcaaatgctcaagctatgcacagtgtagcacactgttcacatcatgttgcctgtggatcaagatgtagaactctcaactccttctccagcaccatgtctgcttgcatgctgccttgcttcccaccacaaggataatggactaaacttctaaaactgtaacccagccccaattaaatgttttcctttataagagttgtggtggtcatggtgtctcttcacagcaatagagactctaactaagacaacagcaacagtcaagtctagatacataataaaaatagccaatacaacaagaggtctggtaagggagatagagggggagtggagtggggagagatttttctctgcttagaacagcatctggcagaatagaggcctggatttccacatccagtgaatcacatggatacataaacaaaagaaaggtctgaggtcaagcacacaggctgaagtatacgggggtggggctaccaagaatgcagagagcatgtgctcatgaaagctttcactgaagaaggtaacaaggagagctatgccttgctctgggtatccacatgaagcattggcaagcagaaggggctgcactaactcaccatccaggtatagaatgaagaaggttggccaggggaattaagataatgttcaggggtgagagaggaataaaagatgtgctggaaacaaacaacatatagttttataatcaagtgtcagtttgtacaacatcagttgtttgtgaacacatctgattgctgttttcttcctgctagcatttcagtatatggtagcaaggaagttacaggcatggaagtagaaagcacacagtttccttaaagcaattcagcatccagggcaagtggcctggaaaggtttgtacactctggtcctttccttctgcttgaaggagccagaggcaagtccaggaccaagtggccctgtttttctggttttcctcatttccattttattctcattctgtttcccttctgcagaacagtgatcaacatggatgacactcacgatcctaccactggcatttggtacaatgtcacagtagaaatgagaagggaagagtatctgtgacagtctttgctagttgaagaatctttttttactggtgtggaagtggaacccagagccttgtgcatgctggaaaagtgctctaccatcaagtcacacctgcagcgcaaaagatgactgactaaggctgatttctttttaaaaatgcttttattaatattcatattaattccttaaggcttctatacatgcatgcaatgtattttgatcctattcactgcataacatagatcacactctcatctgagctcctcccaggtccactcccacactccaacctttcccaactctgagttcaatctgcgctgtccatatactcatggtgatggggccagttactggagctgggctgatgtaccaagggccacactaaggctgatttactatgaatgtgtttcttaagaaatgatgaaaacatggcattttaactcccagtcatccagcatcacttggatccacatgtgttgtcttcatggggaaagcacatcttcccttattgactgtttacagaatcaaaagtactgtggatggtagggataaatacagaagctttgagagacggcctacacttctgcactttcattttagtattgtttctttaaaaagtttttcaagagccattttcttaattaacttttcttctatcttttttttctgccatttaagcatataccccagagtagtcctattgctcataggactcatcgggcaatgtctaaaggaagctatggaggagacaaagagggtcatacttttatttaatgggcagaggccacatgctatggtctgaatgcttgtgttctccctgtttagtcattggtaaaatctatcattgggagttgattagcttaggaggctggaatctcacaaatggggttatcaccctataacaagggaagagcctgccttgctccgcctccacgtgaagttattgttaagggatacacctgtgggatggaagcagcgtctcaacagataccggatgctaaccttgattttcaactttgacctccggaattggtagaagtaaatttctgatatttaaaagctacccagtttattgtattttattgtaactgctttggggaacaacactgggtgtaactgaatatacggtgatagaaagatcagctcctattacacagaggtctctaatttaaccagtcagtaatagtgaaagcaagcgaatttgccgcaaatcacccaatagtgagccccggattatgataaagtaacaaccttttttagtctaagtgtccttcacaaaagactaatgctaactaattaggaacatttagattagatcttcagatgcgcctgagagggtatttcatgctcttttctgttcctacacagaaaatctgcagaaatttagccatggaatcaggaaatagaaaagctgagaagggatataggttatggccagaaactctcaccttactgttggtcgaggaggaaattacccacagggcccacaactgcttagttgcagatctgggacctgaactcacctcaaccctcagtctgtgtttcttctacttgaatactcagcaggtgtgaaaaccgggggcccagtgaggtcacaaataagttcctgcaccaaagttcccctctgatgtcagtatctaagaaaactatggcaggggctggtttgtggcccatgtggctcaggagaggattcagtaccgattctgcctgcctgtcataggcccagctactgctagtggaggcctctcaaggaggcctatagagggagtgagaatggcctgaagggtggcaagtggccttttagtaccatttttctctgaatggaaagtcccagaagagagaagatccagaaataaaatactttaagactccctgagtggcacaggatggccactctgctcttactcctagacaccagcaccctgccacacccatcacgtgcttctcattaaatctgaaccacagaagaacaaaagaacaaagatggaacaccacttcaggctgtgtgttatcttctccctccagggcatgtgggagaatggactgtgggtctctttctggtcagcattcccagcccataccaatgattccctttggggtcctatggctggtggccctccagaaacctggcttattggccctcccctttccagctgccacctccaggcttctacaaaaaaacatctagagagttggaggcaggtatgctacttgtcatttctagatgtcctggaacaggcacacatccccttttgacttcaacaggtttaatgactaactacttatacgaaaactgacaacaaggaaagagacaggccttccttcccatgtgacattagtgaatcctattattggctatggtgtactactaggcatcttgcatgtgattagctgactatgagatgatgtctttgtgttacccataaagcttcccacagttcttcaaggaaggtaatttcgttcctattttaaaggcaaaagaactatggagtggaatgatttatgatcataaaggctgtaaataaaacttttaaaacattcttgccttatttatttttcagcatgttgtgaatcaagatagacataatgaggtagagagagtgggaactcccaacatatgatacttgggtgggaagaacacagcacagcctatgtaggatagaggtgaatgccaacctgccacaacttatgatcacctgggaagagaggtagggtgtgtgtgtgtgtgtgtgtgtgtgtgtgtgtgtgtgtgtatgtatgtgaaccacatgtgtgtctagtgcctgtggaggtcacaaggtgttgaagcccctggcactgagttacaagtgggtattagaaaccaaacatgagttctctggaagtgcagcaagtactcttaactgctgaggcatttctccagctccaaggaaagagtttttttgttttgtttgtttgtttgttttggggggggtggttttgagacagggtttctctgtgtagctttggagcctatcctggtactcactctggaaaccaggctggcctcgaattcacagagatccgcctgcctctgcctcccgagtgctgggattaaaggtgtgcaccaccaaagccaggaaatactggttttacgaagcaaaatgggatagatactcatgcctgaaaggtggaattgaaccactctgtcactaaacagctacaggtttgaagcttgcaccccagaccactgaggatcatctgagcccaacagaagagttttaattgagtagttgtctttattcagttggccagtatgtctggtgtgtgggagggattgtctcaatcattaattgctgtaggaagacctagcccattgtgggtgacaccattccctgggcaggggtcctgaactgtataggagaggagaaagatggctaagtagcagcaggtgggaagcatgggtgctttccctgctctcttcttagctatgcatgggatgtgacttgttccagccttgacttcctgaaatggtccactgtagcctggaactataacccaagtaaacctttcctccagttagttgtttttgggcaagatgttttaacacagcaacagaaataaaactagggcaccatgacaagtagtttcagggtaaaagttataaagttaacatagactgtcctataagcttgggcaagaggtttctcctgttacatcttctattagcacgctacatctgtcacagctaatggaccaccactgacacattattattaactgaactttacactgtattcagatgtccttcatttccctaggatcccatccaagacgccacactgtactgcatcactcagtcttgttaggctcctcttggcttggatggcttctccaagatggggcagctacttggagaagttttcatcacagctaaactggcattatggagggccacagaagcaaagtgtgtgtgtgtgtgtgtgtgtgtgtgtgtgtgtgtgtgtgtgtgtgtgtgcgcgtgcgcgcacgcgtgcgcgtgtgccatgtgtctcatctattgttctccaccttaagataaggtctctcacttgctatttttcagctagtctggtgaccagcaagccccagtgatgctattctttaatgctggggttacaggtatgcacagtgacatcctgggcttgttgtttttgttgatgttttgttttattttttgaaatagggtttctctgtgtaacagccctggcaatcctagaactcactttgtagatcagcctgtccttgaactcacagagatctgccagactctgccccccaagtgctgggattaaaggtatgcgccaccaccgcctggcaacatcctgttttttgtttgtttgttttgttttttaatgtgggttatgaggatcaaacttaggcactcttgcaattggcttatctccctaaccctttttccatctcttctgaggaagggctcatgatggcaatatcacttgtcactgctgaagagaaccttcacatctggctgaggtagaagtggctctgtttcctggctgtaaagtgactatttccctttcctcttaccctgtacccttcagaaggaagtcattcccatgtcccccaagtggggaattaagttccacctccatgacagtgaactatccacaaaaatgatttggaattcctctgtgtgggagatatgtctttctctccatttatttatgtgttccatcatttatttatatcagtatgaacttgtgaatgtttatcttatactttgagttattacctaaggctactttatttatttttgttcagtttgttctagctttggccaccgggagttcttttagttggctccttttaacataatgcctctgtgggggggggggggggggaaggagggggatggtgctcttccttaattcttcattacaagattccctcgggcttgttttctatatttcctggccctgctatacaatcagccatttcttcaagtatctttagctcctgtgagtcctggttgcaggtgtgtctgttgctgtggggtttcaattctaggagctctcagttgacaaagcaagggggcgtatttgtgtatggtaactggcacacacacacacacacacacacacacacacacacacacacacacacacacacgtacgtctatttctgtgtgtcactcatgatctgtactgatctaaacatcagatcatgttgacgttttaaactctaacccatgaccatgtgatcattagagtcttcactctttagttgttaatttttttaattattatttgtagatgtgtgtggttgtgttgggatctgtttacatgagtgtaaatgtccaaagaggccagtggtgtcagtttccatggggctagagttataggcagttgggacctgcctgaattgggtacagggaactgaattccagctctctgtaagaacagtacaggctcttaaccaccaaatctctccagttgcaagtcttccatcttgggcataactaaaaagggaaaaatctgcctcccattgtctaccatccacttatttaattgttcagttctagtctatgtatggttgtctcaggatgcttaatatctgcatgggtgctaaatttgagtgaagtgattaggtacacctgctttgcctttgggggtgtttcgttttgttactaaagtaggttctcactatgtaacccaactggcctcaaataaatgatccttctctcggccttggaagtgctgggattacagctgtgcatcaccatacccagatctgttttcagttttatggtgtccattcattaccagagtgagtcaggccagccccttcacctccaatcacttcaatcatttcatatatttgtgatagattttcttttgtcacaatctatgtgtcttctgacagtcatctgacctgctaaatattttcttaaatttgcgtacaggaaagcacacgtttgctataacacattttgtacaaatacggtgtcgtgtgtttaccattacagtattattcagaatagatgcaccacttacatcttctggacctcatctcttcaacccttctcatcccctaaacccctgtaatgactgatatttatatccctacagctttccttttatagaataccataaaaatagaatcatcaagtgcgtgggctttttcgatcagtttggatgctgtgatgtggaggtcacagccagtctgttggaagctgctgggggtaaataagctcagaaaagtgaccattagatctggtaacatggagggcattaagagaaggggagtgagaaagtgtgaaatactgtttggaaagtgaaaaggcacacacagcagggaaggaagcattagtgtgctgggccatggagcaacactagggaatctgctgtcaagaatctcatgagagaatggccagaggatggcaccggactttctatatgcgatgtgatttcttatatagacatgtataagcttgatgtctggggtggtggcataaacctttaatcccagcagaggcaggcagatctggtctacaaagtgaattctaggacagccatggctacacagagaaaccctgtgtgaaaaataaacaaacaaacaaataaataaataagcaaataaatacttaatttataaagtggacagagtgagaaactaacaatattatatcagtaacaattctaaaatgcaggcatgtgttgcatcaaaaagctatgtgaatgttggatctttctcaaaatatcttgtcatgggggtgggaagataggcggcaaagcacttgctgcatgaacctgagaatctgagtttgacacttagcacccatgttaacagcaacagggcaagtgcagtggaatgtgcttagcacgccagcactggggaaagtggatcttactgtacaaaatgaagagccactgttttccttgtcccgctaaggctcagagaacattaaggaaaatgagaaaagactgtaagaggcagaggcagtggaagacagcagcggaagagggttttttgggtatgacaaggaaaacacatgaacttacagcatctttttttaaaaggaattttaatttatttattttatgtacattggtgttttgccactggtgtcaggtcccctggaactcaagttacagacagttgtgagctgccatgtgggtgctggaaattgaacccaggtcatcttaaccactgagccagctcgacagcatctatgattgcacataagatcaagtaagtccagaatcccaacatgcaaagggtggggctcatgaagacccacctctagctgaggagctattggcagttgctggtggagggtgtggcctcctatagtttgcccatgctacagtggatgtggtcctacacccactatattctggcatctctgtttggactctgtagattataaagaaggaggaactgcagcaggagcacctgaagttgggaaagacatatggggaagaaggggtcttggaggagtggggggttgagggaatggatatggttgaaatatatcatgtacatggttgaaatcctcaaagaataaacaaatatgtgattaaaaaagagaggtgggagtgttgagaaattcttgatctaattaagttaagtaaaatgcactaggatcactgtgacaccagtcagaataacttggagacactcacatcagctatctgtcattctgagaaaaggctccaaatgaggaatgtgcatggataaggattagatatctgccctctgtcaacattgcttgtgcaggaaggtgcccaaagaaagcctcattcgcagcacaatgcacttacctggccgtgcttgccctagcctgcggagaattagctagaattctaccatgtgctctgggagcatttaaacaaacaagcaaaacactccaaaagaagcaacagagatctccaccgagaccctcagagcaatttctttaaataagtttgagaatgcaaagacttcgagagcgcctgtggaaatagcctggatctgtctgagatgattctccttcacactgttcacaaagttgctgcctctgctgccgccttcccaagttcactggccaaatcttcttccacgaacacagatcccttatcacacttacagaaggcaatgcctaggccaatggagtaaaacacacctgagcttctccctgcagcagctctcactgctcctggagatcaatcaggacaaagcagtcttctgcttctttccttcagacttggctcatccataggattatcaccaggcatcagagtgctaacacacctaacagtcatgtctctttgttttcttcctcccagtggatctcctcttcctcccagtggatctcctcttcttctttatagggctgagtattaaaggtttttttttttttttcttttttttttttaaagcacacaccagggacaggccagtttgcccagatccaaggataagcatcttggaagaagacagtatagctctcgagtatccacttctttttctaaattcttttaggcattatcactagattaagcacagacggtgttcacactgcacaaaactgattagttgtgattgttgttcattattctcccacttcttgtttctaaaaaatttgcattacaaacaaccctccaggttctcattccaatcaacttctcaagtcttccgattaatattcctaatataaccaccatgccgttcaactctttcctttgtaagtaacaaaaccaatgatgataccaaatcacaaatctccatgaaaagacaggccaaagaggttaactgcagggtgaacttgacattgcaaaagctagagctcccctgaactaacacagtcaccagagctggtggccctggttaacacgggaaacagcaaagacacagtaaattgtacacacaaagcagccatcggcaatttgcctggtggggtcggatagcatgtggctgataggtctcaggagatggggaacaaacagccatgatggattaagtgattgctattggctgtgtgctcgccctgaatatttcaccatggacagtaatcaattaccagagaccagtaatgataccaatcaaacgcacttagcacttctgcaccatcaaccctagggctgctgacctgccagctgaaaaaggctcagggctgctcaagaaatgatatgtgggctaaccatggaacagcttgtagacgggggaaggcaggcctctccgttcatgttaaaaagataaatggctaaattagccatttacctgctttacaggaaggtttattttaaagcaagcaatgttctctctccctcccagggggcacgaggggctagtttataaatattttggcaacatctgagtggccacaagatttttgccgacaaacagcctcaaaaaaatgactgaacagaagtcacagtgcagctgggaatcagctgtcccattgttccaaacactaccagtcactgtggagtggttgctatgttggcaattcgcatccttgcatcctcgggcagaaatgccaggccatgtctgtctgaggccagaattcctctgcctagaatctgttctttggagtgtccatgagacaatgagaaagaaaagcaggttgcccgtgtttctgacacgacaaaagacaagccagttctttggggggaatctggcatcttttctctcttccttctaggtggtctttatttacatgacaacagacctgagcaccaccggttggaacggacctgcaggttactgggttggcatactgcatggcatatttacaaggcctctgaagccactttgttcagttcgaatctctttccatgtagtggtggcttgtccaaggagtgccacttcagtgggcaggcacgggaactagcagtaaggggaattcatcaaaaccggcttgagaaaggtgttccacactgcattcctgacatttgctcctgctacattttagcaactgttccaagaaaaaagtctcatttttttgtaagctgcagagaccagaaacatctatatctatataaactccactaagctgccatttgcaagtcaactcactttctcaggtgacctgccttaaacatgaagaacataggaatagggaacagtaaaaaagaaagtgctgtggaataatcctcttgtacatggtgaagatttgtcactgtgattggtttaataaagaagctgactgtccaatagctgaacaggataaagttaggcagaaaaaccaaattgagaatgctgggaaggagaagggcagagtcaggagtggccagccagatgcagagggaacaggagatgaacatgccatgctaatacatggcagagtgtaaataaggaatatggattaacttaaaatgcaagagctagttagtaataagcttgagctactgaccaaacatttataatttatatcaagtctctgagtcagttatttgggaagtggctgcggctgccaggtatttgggagcagacagtcagggctgaaagctctgcctacaagaaagcttttaggagagtggaaatattctaaatattgatgtcctagtttgcttccctattgctgtgataaacactatgaccaaaagcaacatggggaggaaagggttatttcagcttctagtccatcatggcaagaagccaggtcaggagctcaaggcagacacccagaggtataactaaagcagaggtcaaggaagaatgttacttattgccttgatttccatgacttgttcatcctactttcttatataacctaggacccatatgccctgtgatggtaccacccacagtgggctagcccctagcacattaattattaatcaagaaaatgcccccttggacacggccagagaattatgtgatggaggccactcctaattgaggtttccagatctcaggtgactctagttttgtcgagtggacaaaactagcacaattggaatcatggtcacataggtgaatatattcaatacaaacatgcaagaatggtccatttattgtatataagttttaggtcaaaagagttaaaataaaaatgtgctaataagcaacctcaattgacacgcaaaatcattggattcagaagtgctaagaacatgtacttagcttgctcttgctatcattttcaggtgaaacacattccacgggtgcatgcttcaaatcaaagatagtgctacctgcctcaatctgttccttctcaggctgccccaggggcagcagagctaggtagagcattaccaaattgcaagtcacctccatccccagatctacaattctcagcaatgaacaaactctgtccatccaaggctctgaatggcacagagagcaggactcatgggtgagactataagcctcctgataccttcaaaggcactgcctccactgaaacactgctcttaacagcatgcataaccattgctatggggcaagttgcattcatgatgagaattcaagaaatcacaaggtacctggaacactggcaagataatcaggccctgcctagccccaccatcatttcaagatgaaatacaactgatggtttctgctgttgtctacctattgtggtaatcctatcatgcaattctgcacgaagatttttgcaaatggatgtgtctaacttctccattgagccatctccagtgtgggattctattagtcatggcttatgagtaacggtgcccacaggacttactgtgaaagccagcaacactgtctcattcttagtctactaacagaaccaggtgacacacgaacagcttcttcctggtatacagggtcatattctgactttctttcttcctagctgcctttgtagggctaatcttctagtcaggctactcttccaaaaggtcaatggcctgggttttagatgatgggatattagcagggaacacaaagatatgctaatcttactgccagaagcctggtgttctaataattttgtaagtttccaagggagggaagcaaccaatagaattatccagctatgagcctatgaaccacatcaagaaacaacgtggcatcataaccctaagggtgcagtggtggcacacataccttggtggtaaccaacagctctcttattggacttaagcccgtaagaccctcacaacaagaatgagactgtgtctggtattagaaacctagctaactactggtattagccagtgaagtcatggttattgaaaaaaaatctacaatcactactctactaaatcagcataatccctaacaataatctataaacgtttccacagtaaaatgtagctttcacccttcatcaaggaaacctcttttgcaacagattgagaccataacagaaactacaaccaatcaaaattcagagttgtggaattcccagtcccaatggatactgtataagacactcttgcatctattgctcagggaaaattgcacaagaggggtggaaagattgtaagagccaaaggatcagggagtttgctatgagattgtgtctcctcataatatcagatgttcatcagcacggctacccaaatgtgagctcaacaaggatgatactaatgggcacgccaaagtggatggagtaaaggctatgatgccttaattctataggtaaggattaaggtgaggaaggctgagaatgagagacttcccaaaaggaagagtacaactgatcatccagtgccaaatagtcagtgccaatgcaggaagtgttatacaaactaaacaggatacacacacacacacacacacacacacacacacacacacacaatccatgtaataacaattagaaaaaaagagtgggggagggtacatagaagggcttggaggtaggaaatgaagggataaatgttacaattaaattgtaatctaaatttttttaaataattttgttcatttggcccctgcctttagtgtcaataagaatttctttccagaataatttgaatactctatatgcaaaatatgtttaaagtcaattgacaggtaaaagaaaagagatcataactttgagaaaagggatagaatcagaagaaacctttaattcgttaaacgttactattttctgttttgatgcttacagaaagtcttccttccagttagtctgtcaactgagatctttgactagtgttaggacattgttgtttgttcactcagttctgtccactccaggttcatgcactctgaggctctatctgtaggtacatatgcatagatagctgatatctattcctgctacaatgatcctttcatctttcaatttgctccatctgcacaatttactgctggccagtggttggagagggactgtggccaaacacctcaagctgatgagacttccatacactgttgacggatctgcatgtggacggggaagtacaggccatttgcatctatatctcagcttttgttttccactagacctttccatatcccttcagaagatttgttttgctatgggataatgctcttgcacactgaaaagatttgtcactcgtattggtttaataaaacactgattggccagtagccaggcaggtagcataggtggggcaaccaaactaggagaattctgggaagaggaaaggcagagatgcagtcaccagtcagaagcataggaaacaagatgagaatgccttactgggaaaagatgccaagccacatgattaaacataggtaagaattatgggttaatttaagttgtaagagcttgctagtaataagcctgagcaataggtcacacagtttataattaataaaagtctctgtgtgtttatttaggactgaacagctgcagaactggtggaacagaaacttctgtctacagtacttagccagaggactgggcaagagtacatgggctgcttgggctctctttggtatcttttgtacatgtgggcagcctcatctaggaataagcatactcaagccatgactacaatatcaggatgctagagcaactgactgtacccacacactataaccaggatcctatgttcagggatcatgggcacaacctgatattccaaaccaagtgagcctcctgtgacagcagtagtaacctgtaactcttcctggtttatgccttctttatcccaagattcttcatgacaactgagttggacaagatgcaggttcagataagatttccttggattcctgtttttttggtagttcaatcaattctgaagtacaaacactccttggatagttggatgcctttagtttacaatgcactgatgtgttcacttcctacctcagatatgcttcattaaaggaaggactgttgttgacttacttctgtaactgggctagtctcacctcaggtattattttaaatgctgtgagcactacaatgaaacatggacatctggatcatctacaggctatcgagtatgatcttatcacaccaagtgttatgcacattctataagtcaaaattttatcttttgtgtgactagagccctcttgaaactgtaggtatttcttttatttgcagtgatggagatcatatatactaatcaaacactctacaagggagctacattcctaatctggattgttttcttgtatgaaaacaataataccatagataaaaatttaagtcaagacattcaggggctcacttccagatttgcaacaaatgattcacattacataggcatgaactattccacatatttttaggagctatgtcttagtttcctgttatacttaggatagttctgtttcatcaaccatttctaccagatctcacatgaatatgtaagaagtgtgtggtgtgtgtgtgtgtgtgtgtgtgtgtgtgtgtgtgtatgttactacactctcccatgaatgtgcatttgaaggtcagaggtcaatgtcaactgtctccctcagttgttcttcatcttatcattatgagtcagtgtctttcactgatcctggagctcacataagtaggctagcctggctggtatcagcctatcgcttcattccagtgtgaggtgacaggcacaaggcactgtgcccagcttttttgtgggtgatgaagatcagttcttcatgcttgtgcagcaaggactaagccatttctacagctactttaagaaacccctcctcttttaaataactcttgtaaacacaccaaaatgtctctaaaaacaaccaactgcatgttccattttggcaccatcttccttttggatgtcacaataggttttccaggtaatctcagacaagcatctgatagagacactgctgatattaaagaacaatgccatttgatcatacattccacctgtcacagtcatcttccaatggctctacgttgctataggcttgagatgacgtgctagaaacagcaaggaaagccaggaaatccatagtctctatttccctattcttggctaaaaacaatacagcactatggcaacagtcaactctgggatataaacagccttgcctacatcaactaaaagccaccctagctggtgaagcaaaaatcaataccagtcccttaaaggaacataaacctatttgcctgagatcatgtaacaaattggtacaacagccagtaaaatggccctgaatgctggccctttaatcactacatcccatgattcctctactgatatcaaaaccaaaccatagcagcagttacccaaacctttatcccctgatcccactcatgcttgagaattttcttgctagagcagaggaatggctcgtggaagagggcagagactggctcaatactccagctgtgttgatagcattctccatggagaaaggaagggttaagaaaagatttagccttctttttcgttaagttcaatgcaagtatgatcaaagagccggattgcagataaactgacaaaacctagattgattttgctgtttggcccagaatggaatggatgtgtgttaaaattgtgacacacgactccaattttctccatgagcagttggtttcagctaccatcagttctgaccatgttaaaacacattttcagagcttcttcccgataatgaaaccagtttgaaagttccaaattgttttcttatgggggatgttggcccatatatcctggtaactgttgtgggactcatggaaggatggggacagcatgcattgtaactccagtcaagggaaccacttaagggacaccttcaagaactccaggtcaggaaggagcacagaacaagtaaacattgcttaagtcggcacagagtggcatctaacgaacagttctcatggcctttggattatccctttacttaagaaataggtcaaaaatcacaggtgacatgggcccaagagagggatcactcagtgtttaagagcctttgctgctcttgtagaggactggagtttgcaccacgtcagacagttcacaatcacttgtaactgtagctccaggggatttgatacccttgtctggcttccacaggcaaccagacccatgtactcacgcctttaatctccgctctcttgaggcagaggcaggtggatctctgagtttgaggccagcctagtctacatagtgagttccaggacatccaggactgcataacagagagactgtgtcgcaaaaacaaaaaacaaccaaccaaacaaacaaacaaacaaaaacccataggcaaaggccagaggaacatccttcacctgtctgcacacacgtgcccactcacacatattggtttgtcaacagttatgttttacatattaactaattcaacagtgccccagtttatcaagatgatcctataaacaccataccaagcccttccccgtgtcctctaacttggtgaaatctatatatgcttcacaaaggtttatcactatttaatcacactcccagcctaaggtacagtgttaatctatgacatgagcatttttcttcttccttaaaactaacaaaaataactaaacaagcaaaaagcacaacacagcaaaacaagatccatacctgagtggccaagccatttccaaactaacagataagggtgactatcattcaaatgaacaccactatttttcctttgaatttttaaaaattaaatttatttattatttagtttttgagacatgtctcactgtgcagcccaggctggctccaaatttgggatatttctgtctcagcttcctgagagcttatattatcagctagacaaccactccaagttcatttatttttaattgacaaaattgagtagagttagaatgaacacagaatgcagtgttttctattatacatacattctgtatggctaagtgagcagattaatacatgaattacatcatgtttttatcattttatgtgtgtctatttgtgtgtacatgtgcacatgtgtgtgtacgggggtatggaaggctggaggataactgtggatgtcatcctcagaaatactctaacccatttgagacaagttctcccactggcctggagtgcatggattaggttaaattggctgttcagaaagcccatgggtctgtctccaccacctcagcactgggactggaagcatgcaccagcacactgtattttttatgagattgcagaaaaccaagctcaggtgctctgcttatgagacaagaactgaactttacctattgagtgttctccaccccatcctcattgtgtgtgtgtgtgtgtgtgtgtgtgtgtgtgtgtgtgtgtacgtgtgtgtgtaaacaacacttaaaagtctaccatcagagccagtgaaatggcttagtaggtgaaagggtttaacatgcaagcttgatgtgctaagttatccccagatcccacggtggaaagagagaacactgctgacctccacacacatgttgaggtacacatgagctttcatacacacacacacacacacacacacacacacacacacacacaaataacaacaacaacaacaacaataataattaaaataatttaaatctgctgtcaggttgttattaactacagccatcatgttgccacacagatctcctgagtttactcctctgcatgctttgaccgctgtaaccccagccctcagcaaccctcacgctactctctgaccctatgagttagttttcagattccacaagtaagtgagaccacgaaatatctggcttcctgtgtgtggcttattttaattcttttcctctacctggctggagtctgttctgtttaacttacacttacatctggaatagatataaaggcgaaaatgtatgtcagttgaggtctaaggtgagaaacttgcataggcacagtggcagaaaacatgaatcatggtttttaataagtcacagtgggaaagagttagatcagccaacttcttatcaaatttattttcatgatgtactcgtaaatattcataaaaataatgactttaaagtccatcagactataggctctaaaaactagacttcagacgggagagcctggactgactgtcattaattatgaagtggtggctagctgcctgacactgtgtccttgacttattgcccttaaggagcctccactccagggaagcacatcacaatcttcacataccatagaaaagccacacagcatagccacaagcatcatttgacttgttcattcaatgcacttaaactaacttggcagaagaggaatttgtgtgtattaaaattcacttcccaatgacagagcatcctctttaccaaggcttcccaggggttttttctcagccactcttgtcccctgagtcagcactagcaaatcccatgggaatggctcttgctagggctgcaagagtgaaaggcagagtcaaattctgattgggtctgtacttcaatttacctcctcaaaatttctctaggcaaactgacaagaccatgaaggattctagagttgcaaggaacgtggcaagggaatttaataagacttatgagctggcacagtaccaaggttgacctgctgtccccaggcccgctctgcctttgctgtgtcaccttaggctgaggacatttagaaatgatgttagcattgcttctttggggacactgatgagttaactcagggaaaattctggaaggaactgtagacagagttccagatatagcaaggagaagtatgtagaggaaaaattacaggacatgtctttatataaagatgaagaaccaagggactagagagatggctcaatggtttagagtacttgtggctcttgcagaggacctggattcaattcccagcatctacatggaggctcacagccatccacaaccccaatttcaggagatgacaccctctcctggcctcctcaggcaccatgaatataaatggtgcatatatagacattcaggcaaaacactcataaatacaaagtaaataaatttttaaagcgaaataagtgaacggtattaaggggaagcagaaacaagaactacccccttaattcagccaaggaactggtggcaagagggtaaatcttgagtggcttaaaagagctttggaaaagatcacgaccaatctcattggctttgtcacaaagttgacttagcaattctcttttcccaggcattacccattttaaactgggttactatcattctggaagtaacatctactgaaggagactaaagtactaatgcatgctcaaattcaaatctggactttgctggccgctgacactgtcctaggcaacatactgagcattcctctgatccagtttccaaacctggaagagtgtgagtctgggcttcttggtgggaacctgcccagagataccatttctatttgtaaagctctttaaattctcccaaggatggtttctgaaaaaaacagaaatggctttaagagccttatcaagccaacctttcacccctccctgttctcctcagaacatgcaagggaaccacttaaaaagcagtgtgagcactgggtaatggaagagagtgaggttggaaaaggactctacagaggaagccccccaccccaagccattaacactttgctttgcacaaaacagaatgtgtggtgtgtgcatgcgtgtgtttcccagtggcctccagcaatgcaccacacctggccatttaaattcaggagatctttgttgccacatttctacctttataaataaagacacagaagcaggagaacactggtggtttttgcaacacaccagaatttggggtacagtggtttttaacagcagtttctttacttaatatgactgcacttctgaagggctagttccacctccccatcacgccccctcccacacacacctctagtgtttagcactagaaaatgctacctcatgagcctgcccattgggatccacaaagggcacagtcagtgttaaaggcatccctgtagggtttattttacttcctgggagctcattaaaaccctacctttcgagtctttccttagccaaaatgatctcacagatctcttgaatcacaaaccactcagaaaggattagggggggggggagctggaagaagagaaagaaagaaaatgggattcacaggggctgagtgagactgtctccaggagtgtgtgagacacaagtcacccacggcagacaaagaacaccatgagactgggagggagacaatgacagctggagaggagcagggaaaggcagatcagaatacagagccagaggggctaggagggaaccctcaaaggctgcacccaaactcaatgttgcacccctgcatgagagagacagctctgactcccagcaactgcccaatattttctagtgataagatttccactagtttaaagaatagcagccccgctccgttctccccccatgtgtatggtatatgtgtgttcaataaaaataacaacaacaaagaaacaaaaccaaacttctccgtggctgtatttcccaactccagctgtattcccacctacagagaaccagcaaacagaatggaatggttttaggttctttaagaatttagaatctcctgtgcagtaaaacaaatgactaaggggaagaaagcacctgtctgaaggacaacatggaaaccagtgagtgtaggtgctaccctgcagaagccaggggctcctcagagctgtttatcctgcttaatttctcaaagacaatggaaggtgggagagacgctcacgcgagtgcacacacaatcacacacacacacacacacacacacacacacacacaccaggttaatacacttagggttcccaatcatccctgacagaacagaaattgagggtttgacaaataatttgtacaaaatctcccttaacctagaaaacactcaggggaggggcaaaaatctactcagaagaattgaggttttaaaagtaaaacataggaaaggggaaatcagatcatgctcagccgacacatcaggctgcaggagctaggggcagcacggggccagctcctggaaccacactgtttacaggaagaaaaaaaaaaaacaaaactatggagtggatggcagtgacatcaggaaaggggacttgctcttttaaataacaagaggtcggaaagatacttcactatggtcagacaacacattaatgaaacatcttttctacctggagaaatgcagagcaagtgagctgggaaaactgatctccacccacccttcagcctccctaaaagaggttagaaagggaaaacagacatagatcctggagatgaacttagataatgagcgccataaacattagtagagagatgggctcctatttcataggtctgaaagacaagtggactctgcatcggagtcaggttgaagtcaaatgcattggaagtttaattgttttcatgctctgcaaaaagaggggacacaagccctgtcactcatactcccagtcatctgccaaacacattgccctgtgatggaactcaagactgcctgagggaaacaatgcatcaggtaggtaaagactgtcccctgaccttgcattttaggctgtggacactcatcttttgcttaaaggttaccagagtatctgtgtagaggttttctagattgaagtggactggacggaataagttgactcttttattagaagaaatgagatactgaaaaataatcttctaccgtggcactcattctcaggcaccattggtgagcagaggggacaagggagagacttgcaacaggctacaagagtaaacatgaagtcatttggggacatttcaagacatccgaggcagagcagggggaaaggctgttggcatgttttctcattcagctgagctacttccactaacctcaaaaggtcaaacaattgctaactgagctaacaacgcaaatcagaattcgatattctgccaaattaaaacaacaaaacagataatgataatagtacatgatagcaatatcagctcctttcatggagcttgccctttgccaggcactgagagacccgcatctattaacatatttaatctttccaagagccccatgcacaagagactatcaacttagttacacctgagaaattaaatccttgataaagttggtggtaaagtggatgacccccagaagcccatgtgttaaggctcaggaagtggtagaacatttaagagatgcaactttggagaaagaaactaagccattgggagtatgcccttgacaccctaggaccctggtccttcttgggtctctctttcatttccaatcaccatgaggtgagaagtttttcttttaacatattttctccaacatgctatgctgccttgtcacaggcccatagacaatggggcctgaccatggactgaatcctttgaaactgtagagtgaaacctttcgtcttttattgatgattgccttgggtgttttgtcgaagtgaggaaaagctgacacaactgggataggggtaaggtatatctgaggtcacagatcctataacataaagtgttgtcctgaatggtattaggcaaacgttatatgaagaaaacgcaaagggacccttatctccattttgctcacaaggtgcttcagacactgatctgcacacagagaaaaataagacaccaaagagaccaggaataaagagggcacatgattaagtgtgaggagacacggctgcagataaaactctaccatcaacttgaagaaaataatctgtactcattagagagcagaaaatccaagtggaaataaaacaagaaaaaaataagctgattcttcttagaaatcatgatcattacagcttttgcttcctggtactcatctaatgccagttcctagttgttaaaataataagggtttgaaacacacagcaaagggagtataagaaatgttagtttatttcattatttcagggaaggtcatgtcagagatctagaaagaagaaatggccactggaaaatgagtttctggatctgttccttttggcttctcacccattttgcatgtggatatatgtgtttacataggtgtgtacatgtgtgtatgagcacttgttcacaaggaagccaggggacaccttccacgttgttcctcgggagtaatccaccttggtttgtgagacagggtctctcacagggacctggagtttgcctagtgagttgatttggctgtcaattgagagccacacatcctcctgtctctgcctccccagaactgggcttacaggcctgtgccactgtacctggatttttgcgtgggtggtgaggtcctcatgtttgtatggcaagcataaaaccgaggaagccatcacctcagcccccttttgcctgctttaaattgaactgtttggaactgaacaggatatatgatccagtgctattttaaagccatcaaatctggcagcctgggaacaaccggcttccatccacagttaagtgagagtcaggaaagccagctactagtcccacagagtcccagtcctgaccctgtaccccctgccccactctcctggagaagccatggtctttcatcccctgaaaccactgccctgttgtcacgataaagctgcctgcctttttaaaagcaagcttctgaggtcaccttaatccagtaagtcagtcatttatttggccttactgtcagagagaatttttcatcagtaagaaatggcattgttaggtggtactaagtcagtttataccgctgagaaaagagattccaaatgtctggggttaatatttgtgatatttacccagggcactctcaaaatcagaatattttaaaaatgtttctgtagggtgtttacaggttgatgacctttgtaaaggttgtcacgtgaggaccaaacattttctgaccaaacttttttttttttccttcaaataaagtaggttgattggaaacacattttacctcataccactctccgcactggtccctgcagggggagtgaagtcaagcaaagagcttaggagagaagaaaacacagaggacagatcttattcttttgtttctcccaagtccaaagcctgccttcctattgattttcagatgtgagtacacacagttcatcttctggataatccccatgtgccttactcccataaacaaatacaatttatgagatggaaaaaaagagatgaatctatatcgataaacaaccatcctctccccccactccagccacagtcattaacccagcaccctattgcactcctgtgataaagcccacattcctgtcaggcccactctgccagcatccacacaatgtaaatcttccggcatatttgcccacagcaaaatctctttacaaattaatttgacaggaaaggaaccgtgaaattgtccataaattatagtatgcatatctggcttaatattgagttctttcaatttttattttgttttgtatatatgtgcatgtgttcctacttgtgtgtgcacacaaacggtcatgtgcatgagaccagaggtctaaatcaggtgtcttctcaatcactccccatcttatttttgagacggggtctctcgctggacattgaagtcaccgattcagctacactggctggtcagtgagccattaaaatagtcgtatctcccagtgctgggattatagacacagccaccatgcctgactttttatgtggatggctgggtcctcatgccagcatggctctttgaccgagtcatctcccctcgccacgactctttaaatttctactagagtcattatttcctaaacactaacacctttcaggcagtgatttaacattagcatcacgttggagctcttaatatagtaccaagatagactcacaaaatacagcacacgtttgcattgtgtcccgaggtctgacaacagccgaagccaaggtgcctgtagtaccaattttggtcactagaagttcgggttactaaatgaaaatcgccagagagccacagaggagtcacatttggaagcagcaagccccaggatcccactgggcctcctgctgcggcaagtgtctgatgtctctgcagaaggagtcttgccttggctctccctgtgcatcccgctccccagccctctctgtgcctcccgcccctgagctcctgacccagtttctgtattctgcacacagttcagtgcacaaggtgttctcccagcctttgtcttgggccttgtattctcactagcaagagctaatttttcttgtcctcaattacccacactgaggagtgtttaagaattgttacatcagccgctttcctatttaactgcaacatgtacttataataagagaattttaaagtttttaaatatctaataggagagagagagagagagagagagagagagagagagagagaggggaatatatgcacaagggccagtgccctcagaagccagaggcatcaggcttgtctgcaactggtattaaaggcagttatgagctacttgacaggggtgctgggaactgaattcaggtcccctgaaagaacattcttaacgactgagccatctctctatcccaataactgcattttaaataccacttcactatgcagttctccccaagtcaaggaaagtattctcactaatctagttaccattttactcaggcaatatctaatgagtgcctactacttgtgtctagactactcaatgactccaagataaggaagtgactagaaagataaaaatcccagcccacacagagctgacatccagtactttccaagagtcacagaaactcagacagcgatgttaagtcacaagatactgtaaacttacactcaaggacggacttctctgctcactgcatcatctgatgggtcctgaggctgagggtaccagttcttgtgcaagcagctggacagcacagaagttatgcagctttgtattcaaagaaattgttttcagctaagacagagtggcagcagctattgctcttactggggcacgttttctaaacaagggatggagtcacgggaagcactgggctgtactctctgccatgcttgcttagataggaggtagttctagatcttggtgaaaagcgacttgttttgtgagattttaaagtacatctctggcactcggaaagggaacagatttaaattagatgttctgactgaggccactggaaatttgttctatgcacaagtatttatattttccatatggcatgcaagtgttttcctctcctttgcgtatgtgtgcacacctgtacatacaggtgggagcccacagaattgactccattccattctgacttaaggtcagagagtctttacctgcccttgctcttccaaggtgaaacaacaaggatgtcaggcctaagatgtgaatgcaacaggatacttggcccaaggtgctgtcgctacatgtcctgcctaaacaacagaatacttaactcgggatatagtttcttgatgttttgggtactgaagaggtaattactctgttccttgtatcattggaaaggaagtcttttgccttctccccctctttggattgggggtataaaagaattttgaacaataaatttgagcagattcaatattcactgaatgcccttccgaccctatctcttgtttcttgtttgcttctttcctcagtttgcactccccttctcaggtacaaacctggattatctggcggacccagacacacatgtatgcatgtgcatatgggtcagagaggggtgtccattgaatcatagtctctctgtcttatttttgaggtgatgtcttttattacctacagctcatggatttggttgtgttggggagccacaagtcccaaagcgtagcctgtttctgttccctagcactgtgtttgcagacatgcctaccccccacccccaggcttggctttgtcatgagttctggggaactaaactaggatcctcatgcttgcatagcaaatgtgttatcaactgagccatctccccagttccagggtgtttaccaaatgttagcattcatcccaagtaaatctgcaactctgagtgcttgtttgctaggagagtgagatctgctttttacttcattctctctccagggagcagatctattgaaaccacttgaaaatcagaactaaggatttaaaaaaattaaagagatactgtttattttcaagcacatcgcccactagaacgaagtcaataaacataactgttttcaagcatgtccctggaggtactttgttcactatgttcacacatccacaaccgtttcacaggatctgatcatgtcaggaaaaaccccgcagatcaataagaacaaaagaagtgtcaaaatattttgaaagggggggtgatacacctgatgaaaaaaatcaagatatttctaatttgaattaagggaaacacacaaaataatgatcccatttgacagtatatagaagacctaaagctaaacttagatgactttacaaagcaaagaaggaaaagggatattaaatagttttactacaagtttcttcacatacatacatgtatgtacatgtgtacacacacaccacacacacacacacacacacacagacacacacacacctatctccactgaattaatggctctactgaagtttattagtgtttaagatttgtctatttatgtgtaacctctacttgttcacagatgggcaagttactataaggtggaagatagcatagttaacaatttattctactattcaatctatcttgaacatcccacctctgaaaagagggcagaaaaatttctatgagaattatgatggaaatatcttccaacttaaagtatcaaaaattctgaattagcgagcatgttaatttctactctttattagagaagttgtgtaaatctcaaaggggaaagaggcctagagacgcttcaagccattacctattatttaatagctcttcaatcagatgaattttcttgccagccaaggatcttaaaatagcaagttttgaaaaacaattcttgtgagttttgcaaccaaaaaagaattactttggaaatagttcagaggagaaaggaagataaaagaatcagtgccctttagactcaaaggcaggttttgcttgtggaatccaagtcttactttccaggatgtagaaaagcagctggtcatagtgtgtgtgtgtgtgtgtgtgtgtgtgtgtgtgtgtgtgtgtgtgtgtgtgacaggttgtgtgtggtgacagccatccatacttgagagggcagtgagatgcatgcgaaacctggtcttgactcagctgccagcccatcagctctgtcttcctaccacacccttctcagttttactttcttctcttctatccaaatccatctcttagaacttcacagctacatttccaaagttcccacaaacccagccttctgtcctttcctgaacttcacctccagacaaatgttcctgaagtctatccgaggcattctgccactgctcttacagaggttcctttgtttaacaaagaacatccaacatgatctaatcaagcagtgaggttcccaggaactgggcctccaaatggcattttctagctttaggttctaacccttcctttctcctcagacccagtgatatgaacaccctggaaccatcccatagggggcactgacacaccactgacaattgagaaccatactgtcaattaactcaggtttctaccttcctgacattggtcaaaggtaaaccaaatctactccctcactgaaaagatgctatggatgaagggacctgtaccactatccacaaaaaatatcgcttctatcaatgattaatgtagctaaccatacccaattaagagtgatgaaaaacatctatacaataaaagacaagtcaaaactgttaaaatgccaggcagtgttcagagcacttaatagacactttatttgaacctgtggaaaggtatagctcttttcctggcagaaaatcatttttctactttactttccatctagaaaatatcagtcaaatatttgaaaagctaaatgtttagcatgccaggggcacccatgtgtcccaggcaccttcacccttgccatgctgcctatctatctatagcacaagcacacacactggcattcttttgcttccatgttcacatgtcatttcttccttggccatttgtaattctgactgtcctttaaggcttaaggctcaggtgactctctacctcaataatatcttccttcttcccaattagccataggctcccctctgtcctgtggattccccctatctctcacacaagaccattttgtttttcataaagaacaactgtctatctacctcatggcaaatcatattatagaggctttatgaattctccaaagtaactatgggtcttatttcacttttgcagataataagctgaggttaaacgaaatcagataacttgctcaaagccttacatcctcaggccctcccaaggaactgtgtacatacacaggggagacacaatggtccatacaatcttctatgaaaagaatggcaagggttgtacagggactggaagtagatgtactcatctaggcaggcagacacatgggtgtctggtgttcaaacccagggctgcattatttgagattctgagcacttatcaccatagaacttccgtcttacttccccatcctttagtgaagtttttgaaggcaagcacatactttgggcatctgggttcttcccaccctctgttctcaatcttgagacccttgtttgactttaaaacctgtgctgacactgttaacgatggtctcagacacctttcctttcccacacaagtgggtgcaaatggcattcaacctccagcttcccagggagcatttccggtttctataaggcttctacacatgtgtggacaaagtcattctctccagcgaaattccagaagtttcataatttggaactgccttctcatatgttctgctaaactggctttccaagttttaatgacaacttaacagtttttcccagtagctttctaaagggctcaacatctaacagtgttctgacttcctaacaccagcataacagtagagctaaaggctcgctatctatcagtgctctgacttcttagcaccatctaggacagtagagctatgccataagcacatttgttaagcaggttgacataaacatccaatgaaaactagaagagtagagtggaaatgacaaggaactatgaatgaactgacaatcagggctgccctaaagcctattgcagatatagtctacaagaacatggttcatcaaagcaggaatgtcagcaaagagttaggtacatgagtcacagtatgaaaccaagggtcaactaaatgttcaatgtggagagatttcataaatagcaatgtgtccaaacaatgcgaggcttcacagcaatcaggaactgttccctcaagaactagttataaggggacagagattgttagaagccagaagaaggactgctgcaaaagagtgttttctggacagggcatttcacacatgtgaactcagagtggtcactgcatgcacaggcctgcacctagtaagccagaatcccaacatgaatgattaaggaaccattgacgttgacggatgcttcggggaatgtcatttttctccatgagtatggcctctcatgttagcccatgttccagtgcatggccctgcacccatgtacatactgggaacaccagtagactcggtgggtcttttttaaaacagtgagtgaatgaagttagagggggtgtagtggtagagttatgggaggagttgggagagtggcgtggcgatggagttgacgaaaacacattataaaaatgtataaaattctcaaaaaccaagtttaagagggaacatttattgggtgtcacctactgacacatgcactccagaagacagtgctgggctgaaaatgtcaaacctacacagacaatgtaattcatttgactctttaaaatggaaaaattatagaaataggggaagtgcttgaggagtagcatgaagaatactagtggctgtggaaacggtctgtgttgatcagatccacattcagatcctggttctcagactgtgctgaagcttttcatcatgctggaaggaggacaactggaggtctacacacatcttacagttatgccaatggttctcacccttcctgatgctgcgactctttcatacagttcctcatgctgtggtcaccctcaaccatgacattattttgctgctacttcttaactacaattttgccaccgttgtgaatgtaaatatctgatatgtgacccccaaatgggtcatgacccacaggttgagaaatgctgactttattcaaatataacagttattaaaaagtaaatgaataatacaatagcactatttctttaagtcaagtgactttccattaaattcaagggggcttgtatagtcaatcgggggtatagatattccaagttcagttaatcttacagttttaatttgagaactgaacctgattctaactgaaagcttgaggatggctccctccaccagaagggcagtgtctgcaggtatatgtatcacataaaaacaggacagaaactaaacaaatgaatagcacccaatgaaaactgtaaaaccctttgcacaccaacattaaaatcgaaaatgaatgtgtgaatatagaaaaaggcacatatatgaactcagaggataacaaataagtcagacaaaatacagtttgtggcaatagtggggtaaattaatggtttagttaagaaaaaaaaaaaacctgtttctcttaatatactaatgttaccagacagaaagacgatggggaagacagcacggggcagttatttaagccggaattgctgattccaaataaggcactggtcaaaatactgtgtcaacttccccacaactcctttcttgcagataattctctgtaaaaaggaatatccaataatttgtctcaccaggcttaatttttctccaatcattcattaacatagccatgggaattgtttatagtttacaatctggtatggcttggaattgaggaacaaaggaagatgaactagaaatgattacttgctgcttatattttaatgatttgtgtgtgtgtgtgtgtgtgtgtgtgtgtgtgtgtgtgtgtacattgtgtgtactggttcaagaagtggccaaaatagggcatctggttccctggagctgagcaaaagcccattgtgaatgacctgatggggacagaaccacagttccctggagaagcagtcagtactatctctagctccatgattttattctctctctctctctctctctctctctctctctctctctcgaaaagcagccagtgcttttaactgctgatccatctctacagccctgatttcatttttaaacaaacaggctgaaaaatgaatggttccacaatgaatgtttttgtcacttttctgaatgtggagagtagtgtctacaagtcactacaaattacaaaacacatccctacaggctgcacgcacatgtatgcatcttttttttcagcttttcatgatcatcagtaactcagtaagaaccaacaatgaggtaaaaatgaaaaagacaaaagaacagaaaaacatcatttaaaaatagatgaagtctgtgctcttaacctctgagccatctctccagaagggaagttgggaggagaacaagaggactgagccaagggaggaatagaggagggcaagaaaggagatgccttgatagagagagacagtacaggtttttagagaggtctggcacaggagaaatgttaggggatccacagggatgaccccaactaagaatccattgatgcccttcccctataacgagattggtgtctaccttggttaccattcctagagtcttcatccagtagctgttcaaagcagaaacagacacccacagctaagcactgaaccatagtcctagaatccagttgtggagagagaggagggatgagcaaagtagccaagatggtgctgcagaaacccgcagaaacaattgacccaacctactgagaccatggagaccctagtcataaaactgcggaaacagcattggaccgaaccaagccctctgaatttggttgccagctaggaggccaagccagtctatgggacctctaacagtggagccagtctttaaccctagagcacaaatggactttgggagcccattccctatggagggatactattataatccagatacagcaagaaaggcctaggccctcccccaaatgacataacagactttgaaggtctctggtggagggcctcactatccctggggatgaggtgggggatgggttggggggattggtggggaacttgggaggatgggaaggagagggaatggggggtggatatgtaaatatgaatagtaattaaagaatttaaattttaaaaaagattaggtcctacatcttgggttaatgtatatatagcaaataaaaccccctgtcataattacaaaacataactagagaaataaagttggtcccttacaaaatgcaggggattgaatgttcaaaaaaaatagatgaagtcatatgaaacctctgcttaaattgctaatatatattaagttggtaactggagggttttttgtttgtttgttttgtttctttctcttccaaattgtttgaaactcaacccctaagccacttgggtctctgatgctttctgttgagcaatctcatttcacccttaggcctgtggagctggcctcagctcttctcagtagccagtgtccttctcaggcaccagctatgttttcttgatcttgaaattttctctcattcagtactttgaccaactacatcctaatggatcttcaataacactttgggtgagtatatgaaacttccaggtccctcagaaaactgtggaaagcatactttaaagacccacagttattttacctctttccttcactgtcatttcccacttgacactttgacaaccttttactgaagaagaggcctggcctatagcatgtgctcagtaaacatccaaagagagatttaaaaaagtgaatgaatgaatgaatgaatgaatgaacaggtagattcctatatttctgcttcaggtgagtgttatgtgtttagactggcaaacagcatagggaaagtcccagcagaggtcctgaatgcattttagattttgagtttcatcttttcattgtggtacaaatcaaggagcctaaggacctctccagaaaataatatgcagtctcagacatgtctcctgagagatactttttgtttctttgtttttttgttttttgtctttttgagacagagtttctctgtgtagctttggagcctatcctggcactcgctctggagaccaggctggcctcgaactcacagagatccacctgcctctgcctcccgagtgctgggattaaaggcttgtgccaccaatgcccagcgagagatactctttaagtaccaaaatccatcttggcagatgctccaaggcccataaacagacacacccggtaccttcagtattcagcaaccactgtcttattagggcacctagcacacattatctaaattacttgacctgcctgcttgatttacttgaggaagggtggaagccctagcaccttcaggggcttcttagaacctatacctacctaaaggtttccatctttttcatatggagattgcacaccttaaatcaccaattctaagcaaagaagcagtgtttccaagacaaagaacttaagacacaggatgcaggcttgcctcgtgtctcatttcagaaagaccatcccaccacacacagcagccctaagtctgtccgccttcgggcctttgtgggcttgtttggggcagacattgggaagtattaacaacagccatggcctgcactgtttattcagagttaagcattaacaaggctaagccctctaacctgccaccgtcttcctccaggaaagaagtgcctatgtaaatattctaatgcaaacaccccagctttcctaggggatgggaagaccagcagacagctaggaggacagaagggagctgtggctatttggaaagtactgcgccatggaacttgattccaggctgactttgcacacttggtcagcctggtgttacctagtagagaggcaatgaggcacatcgtcctggattcgttcatcatggcttcaaatagtctgatggttaggaaatggggcccggatcttttacagcatagatgggggaatcttgtcatggaattctctgttcagggcttgcctgtttaggttttggcatgggaacagctgttgccaagtgttggattctgttctgaggagacgggaatgctgacaatattaactcaagcacaaagaagggccaagagtttcattagagctccccttagatactgcttgctggacactgaaattgcaaaacttgccacaagacccaacgctgcagaagaagtcaaatacaaatacaaataaataagtaaatagagtcagattttctgtggaaattggcccactttcatgaatttacctaaattgatgcttgggtgaggtgacaagaaaagaaatccaaactcagccagttgcctgtggaacaagttgaaggtaagcacatgttctctcctccagatctgaggagagagaatgcgtaggtcaccttttcgctcttgaagcatccaagcaattacgcaaacatgcaagcgaacaccatggagaacagaagacagcttgtctcctgtacaacctgagatgtaaaaaccactacactgccacttgcctcccgctggacacctctgtgctgtttagggaggctgcccttggagttttacttgctttgaatcccaatttaaccattcctgatctgtgcgagctcagacaagctattctgacattttaaattgtgtgtatttcagaaaggagcacagatgactgaaacagtagaaattaactggggatgggatgggagagaaaagaatgctttgctggtgatgtaaccttagtaagaacaaatgccaatatttgttagggaggcaggggtcaggtgcctctgaagcactgtagccatccctgtacatccctgcaaggtcactactattattgtctcaggctataacatgagaaaactaagacctaagaaggaatcacatctaggtcttgaactgctgactggcaaaaccgtctacctatattccctacttcattttcccctttatttaaaaatatgacaacccaaggtaggggcaatggctcagtgtctaaggctcagtgaaggcaatggctcagtgaaagaaagaggtcctgagtttgaatcaccaacacctatataaaagttgggtgtggctaagcagatctggaatcccagcattgtgtctggtggacacagggtgatgatggctggggcttgctggccaccgctccagctccaggctcactgagagagcctgtatgaagagaatatgacagagaatgacagagcaggacacccaacatgctcctttggccttggaacatgcccgcacatacacacaagcacactgatacaaaccagcttcttctgtttaagtgttgatgtgcagtttgttagtgaacgggggagggagggagtgggggggggggggggagttttgatgggacaatatgggagtactgtgttttgagaacacagattctgtgtgccccagctaatatactggaacaagctgttcataaactgagggcttcttttatttccccttgcagtaagtaaaaagtgtgggagacaggaaaaattgtagggatggacagatgcccattcctgtggatatacaccctgggggtggggggggacaacaaagcaaggaatacccacgccagctttctaagtatactcccaaatagacatgagtgaatactaataacacagaaaatcaataggagacctcacaaggaacaatggattagtagggacatttgtggaggccagaatagaaggatggcaggaggcaccatcaggacagaaaagagacactcattgctggtttgtagggacccatctctttttgcctcggcccacaatagaaagagtttgtttagtcagttttcatctctccttcctggtcctcatgtgctacggtaaacttagtagaacaatgaacggctttaacttgggcagaggtcaggagggctgtgataaagagttctttctcctttagttcttcagttgttttctatctgtgagtaagggcaagaagatgtatttaataaaacagggtgtactgtgaccaaataaatctgagaaatgcttcctgcatccctctcttaagatagtgaagtctcaagctggagagatggctcagaggttaagagcactgactgctcttccagaggtcctgagttcaattcccagtaaccacatggtggctcacaaccacctgttatgagatctggtgcccacttctggtgtgcagatatacatggaagcagaatgttgtatacataataaataaaaaaaagaatgtttttttttttaaaaaaaaaaaaaaaagatagtgaagtctctgtcagggaaggcatccactcaacacataagccattgttcccagggcattttgatcatcttgtctattaatatacccatgcagagagactctaagaatactggaacaggtggagatatcaccaaactcttactttcctttcctaggtgacttgaagaagtgactgaactttctggacttgagtttcctgactgatctgaccacgcttgcgtttgcaggctacgctagcctcatggctcttcttcatctgtagctgggtctacagcacagaaaccggggtcaacagagtcactctacagcccatctcagaagtttctccagtcatcagagacaccgagacaatggatcctttacatgttcatccaggccttcatggcccagctgagcattaatgtcccaaaggctgctgagaacataagcagaggcagggaatgtgcagggaattgttaatacaagcttctacttgttctctgaaacatgttggcactcagacatggatttttgttgtatatttccatttaaatatgcaagcttaataaacattattcacccaaaacagagaaatgaaacaaagtcgtgtaactgattcttaggcgacattcttagatgttttcccttcaaatgtcaattctgacatttcaactgaaaaaaaaaaaaaactgattacaatctagaggattcttcccaatattaaagaaatatgtcttttattcaaatgtacaaaattttgacttcttatatttacttgtatgctattttgcttttaaacagggataaaattaaagggtatctgcccaagttgaagacagatttttttccattcttgtttttacagaaagaatatattaatggcataataatagcaataggaaatgctcaataaagaccctagtatatagccagcaagatggctcagtgaacaagagcttgcagccaagccttgatgacctaacacagaatcccaggacctactttttggaaggagagaggctacccctaggagttgtactgtagcatgtgtgcactccatgtatgcacacatatgtaaataaataaatgtaatttaaaaaatatcctagcttgtgatagagcctattctagtactgtacatgtgtgacccaattttagaaatgtgacaccccaggaacagagagaaaaagaagcctcacgaccaacactattaagtggggagactaagatttgaaaccaatgtcccatcctgaatcggttcaccggctttccaccggctttcttgtttactttgtgaaacaatgaaaccatggccatcaaaacacagagggctatgatttggaaagacacggactctgtaatacaactaaagttttgatctcctggctcctgctaagcaagagtagaggagaaggcctagcctgttagagaaacagatccctgagctgggccatctgccaggctcacctaggactgggaacctccacttgaagggctggaaagcaatgtgagagaagcacttgaaattctgaaaaattctcacagaagccaatacaagctaaattgactgtcttcaacctcgaatgccagtgcctcccactagttttcgaagacactgaaaggatacgtgtccacgggagaagggccaagggaacagaacagggattaaaaagacttccagaatataacaataaagatagactttgctggtatctcactggtaaatacaatttggcaactatatggggtcttagggtctttgcttatggattatgtaccagatgttgccaagatactattgctaatgggaatgtggttatatggcaaaaccccacttcaaaaaaactacgtattttatgtgtatggatgggtgtatgcctgggtgtaaacaaatgcgccaggtgcctgcaagagactctggaggccagaaaaggttgcaggatcacctggaagtggagatgactgccacaaggatgaatactgggaactgaaccgggctcctctgcaatagcagcaagctctcttaataaccaaggcatctctccagccccagaaatcaccttttagagaagcaacctgaaatgaacaaagggatgtggtgtggtgtccttctcgttttaattaaaaccagatagatggaacaagttgaggaaatctcagtaaccactgaatctgagtgatggcagttaggagggtgtatgtttgatgtttttgtgataaaatattttgataaacagggaagaatttcatcatgataaaaagaactatatggtagctaaagtggtttgaaaataaaatacttgagaaggagtcagatacgcacttgactactctcttctacaaaagcagaaaaggcagggagagttgactgtgagaacagggggtgaaggacccacagtaaaggtgctgaccttcagggcgattttaacaggattcactgtccattctcaatgaagatactagatgcaggagtctggtctccatgaccacctgatgtagtgagacttcattgctgaggtctctccatgtacatgtgcatgtgtgtctgtgtctctggggtcagctcttctgtattgtattatattgtttgttttccactcataaggtgacagccccataaagccatcaggcacacagttcctcttgatattcaagctgtgcttcctatacatgaatctttaggacagataatatccttcaataatcaggaattaggcaagatcaagcacgttcaaggtgagttgggcatagatgataattaggaattagatcttttttttccccaagaaaatggctcatagctaatcattacacttcccctaattgcctttatgggaggctctgcaaagcctatgtcaaaaacgcaaataaaagcatccagagccatgaataaatatcacacaaattcacagatcagactctacaaatactcagttttctagtgtctctcccacttcccatgtggacaactgttttgtttctaaagatgagctagttcattgcttataactacacttgagaataaattctgcccttgttatctgaattgaaatgtgattatttgcagctggagagatggctcagtggttaaaagaactggctggtcttcccaagagcccaggtccaatttgcctgcacccacatggcggctcacaaatatcagtaaccccagtcatagaggactcaacactacctatggaccaccttgggcagcaagcacttatgtggtcacacattcaggcaaaacatctattcacataaaacaaaaataaacaaatgtgatatttacctgttctgggtttattggggttttgggggatttggtttttttttgttttttgttttttgttttttgatacctattaatggcgggagattaccctgccaggtagaaatagtaaacttttcttgttgttcctattattaaatatcaggttgttgccatttgtttaatattattaaataaatgaccaatacatgcttctaaatgcactgctttcttcgatacttatgagcaattctaaggtattggtccttggatcattattcaaaaaacaaaatagaaaacggtatgtaatgtcaccttaacacaagaaagttttaggtccagagagagacccagtctcaaagtagtggtaaagagtgatagaagtgatctgggtggtggtggcagtggtgaagcacacctttagtcccagcatttgggaggcagaggagaggcagatgcctgagttcaaggccagcctggtctaaagagagagttccaggacagtcaaggctacacaagagaaaacttgtctccaaaacaatcaaatgatgatgatgatgatgatgatgatagagaggaagaccaccacacccgatgctctcttttagtctttgccacaaatgtacacacacacacacacacacacacacacacacacacacagataatgattataatgataacagtactaatataaaagacactgatgccactgaggagtgtggcccgggtgagttcagtgcaccaactctgttttctgtgactcacactttgctcctgacctgagatagaaatgtctttctatttcaggctttgtggaagccctcgaagccctccctgacgggacacccgtccagtcccctttgtggtttttgctccagatgttttcccttacagaataacaaaaggaccttgccatcatgactctgttatttggaattacacccccacctcagcccatagcagctgctgggcctcaaatacagtgccttctccatcttacctcagcaatagttagatgcttgcatgatctttcagctgaaactctcctttaaattcttaattaattaattagccagtgttgggatcaaacccagatcctcataaactctgagcaagcattggatcactaagctaccctgtcagctctgctgactctctgaaatctcaccacctatagtgcctgagactgagctgggcccaaagtcaagactgccatgttaatcagatcatgaacaccactcagttccggagcaggtaagctcccctatcatggtgcgtgcaaaccagctctgaaaaacacctctccacttagcttctacaaatttaatgaataggctgtttacatcctgtcccagataattaatgaagactgtaaaaagaaaaaaagaaaaagaaaaagaaagcaagactcgctgagcacagatccccacctccttgaagcctagtgtgctgctatttatcatggcactttcgttccttcaggcagttttcaatcaatctgacacattcgactcaatctgaattcatttctgggctacatttcatgagacctgctatcaattcttccattgatggctgggtgtacttggaaatgataatgcagccagtgtcctctttttgtctattgttttgtgatttttttaaagctcaaaaatcaattaatttagagcaaaaaacaaaaaggctatataaatcctgttgtccgtggctcatagctacaacgtcccactcactttaatatgtttcttctttccaattgttctattatttgtgtgcaacgtagtatcctaatttatttatgtagtgagcaaacactcattgaatacttagtgagggcaggtaccatgtctgggatagtttgatttagaaattaattattcaggggatcttctgtgaaatattacagagtagggtctctcctaaactgatacctgtgctacatattattgatactgagacacagaaggccggaagaggaagaaatctgtatggtctcttactggctggaatgctcaacaggttccccgggtaagaaatctggacaggatagctaatggaagcaaacagagaatctgtgctctgattgccttccagggctattctggacacgttagggttgagtgtgcaccctctctcacccctcacctctcactattcttcccgatttccacaggacatctgccctgttttgatgaactcattactacttgcattagactggctaacacatcatccccagatctggcctatttatttcttttgtttgtcatgatcacagttttcttcttcttccctctctcccttcttccctcccccttcctctttcctctcttaaatgaaaaaggtcttcattactgtttaattatccttatttatcttcttaaaaggccagttttaaaaagtagttcagaagctcagctattttgccatcaatagctcagtcatttgcacataatcattaagcttatctccctgtttgttaatgccaggccgcctttatttctgctgtcccctcctttctcttctttattatgtttgtattattaccctctgctccagtgatcatcataaatacttctgggctgcaactctggaacctttttgatgattcatatgttcctaggagagttctatagacagatttcatatctctctctctctctctctctctctctctctctctctctctctctgtcactctctctcccttcctccctctctcccctcccctctaccctgcccccacatctccatcttcttgtattgttgcacagttgtcattatcacttggtcattatctattttttccattgatatctggcctttgtggtgaaagctctggtgctgagtgaaacacctgctcaacttacaaggtgagaggagctgcagagagaggtcctggacaccgagcccctggacacggagcccttgactttcccctaggggaagaggcccaccttctcactaggaacaaactccactccactgaatagcacctttggcctcttccagtgacagccctcccattcatcaattatgcctcaaagtcagggagtggagggaagtggtaaataccctctcttctcagggtgacacactaatgtttgtactaagaagctggccacttctccttagaccctgttcctgtggttgatgcatttgcccctatcatttgtggtactgaatgaatccctctctgaagcacacaaataccactgctccccaacccccacaaaaaaaaaaacaaaaaaaacaaaacaaacaaacaaacaaaaaaaaaccagggtttctttgtgtagcagccttattgtcccggaactcaatctgtagaccaggctggccttgaactcagaaatctgcctgcctctgcctcccgagtgctgagattaaagattaaagacacctgtggtctgtatttttaaatagaaactatttggagaaaaagatacattttaaacagtccagtgaggatgatatcccaaactggggaaaagaactggttactgtattagtaataatattttgtgacacacccatctctccagtttaaagctgctttttaaaggcaaggagaaaatactctccatcattatggaaatgctatttttatgtcagcttaccaaataagcactttttcctactcaaacaggtgccaatttactgcatcctgcaaaattcacaccagataaagcagcctaagttttttgatcccacacgtgcagtctaacagaaaggctctctgtttgacggtctaagatgacggacacaaactaagctgacttttcccctcggctgcctgagcacgcatgtcacacattctcccctatgttcgcataggagtgggcacagcaatctttgcaggaagaaaccaggaaggcaaaaaggaaagccatgatcgggatcccgtcttctctttgcccatcctgacacccccagccctcatttccctataatcattttcttcagttctaacatagacccttccaatcccctccgccctcacttacaggtaattgtttttctcctttttgaatactgaactagccacaagacatggcagcaacttaaggaatcttcgagaagacagggatttaaatgatttaaaaatcacagctactgatggataaatgacgacgcacatggttttggataacaaatatcagctgaaggggctctaacaggctcaggcctggcaaagatggctctggcaggtcttgatttcctccctcattttctttgataaagactattagattgcattcctaaaggtagccagcaaggtctggtctcttatttgaccacttcctcctcctgagaatgaccaccaaggtccccatcctctgactcctgcctttgtcccttattccctgccctttgtccctctaaggtaaataaatctcctttgtgttgagaacttggtcttggggtgtcttgtgccaatgtccaggtccttttccccagctctggtaagggacctgtgctaaactgtccaactgacggggggtggggggagcctgtcttctctaggtggagactaacaccatgggaagccaaaactcagctttcaatagaaggacagaagaaaacggagccaggctcagaatagctactccaaagcatgtcattcttagcccatttacctcctccctatcctcccgtcccccctgcatttctccccattttgtctgtgtctcctgaaaaggaaagattcctttagctcatctcagcctgtgcttttctccatctctataagtattctactacccctcctgttcggctcaccatcctcatctcctagctcactgagaaccaaatgcaggcttctgaccgctgccagctaagtgcttgagggggagctgtgcgcttaccccctgccactgggccagcctcatctcggaagagacattttaaaccccagggatggtaaaaatcatcatcattattacctccctaggcaccgtggtgtcagcagagatggagaaactctaaaattacacaggttggtaatgccactccggcatacaagatcatctgaacatcgatgatctattggcagcaccagaatagatgaaccaacaaggaagtaacagcagggtgttctcatcctgggtctctgctgcaggttagtgggtaaaaataaataccttatcttcaaaatggccactagttaggacgatgtgggggggagacagatattgaggggcagaaatttaagcttaagtagattaacaacaaagaaaacttctctaggatttttctaatgcttgctcatctcatgatttaaatatttattcttcaaacgcagccagtgtgtccacatgaagtcagctgaacactggaccttgggctcccctccgagggtgaaagctgagattttgtgtgtataatattattagagaaaggataaatatttaaaaaggaaccagtaatttttccttatggactaccataagttctccatacacgctggggaagatggtgccatgttctaacaggacagacagacagccctgggagcttgacaagttttcctctgaaattttgttgtgttacattttgacttaaatcagcaatctgtcagtaaaggctttgccatgttgcttatacaaagatcttcagtgagtgacatttgttgaagtgggatttaatttaaatttgataacagccctatggtgacatggaaacttccatttccaccagggtcatcacaatatttggaaagggctatagtaccgtggtcacacactgccttcagatgcttctgtccacaaaggggctgctgaaaagtaggctttgggttttgttgtttaatggagatttttttccttatctctcaactgagtgtgatctctccattttatgaagatactcaaacttgtttttgaatatctttgcagccttgcccttgtccatgcttttcagtcttgactgaggcaacactgtcagtcagtgcatagtcttattctaccttggctggctggtcacaaatcttcaacagcaagtaccaaatatgtaaaaagcatcagaagcaaataatgaaacattgggccctatctgtatctagatgccttccacccttcctgaaccaaaagtacctttccaggtgtctcctccaggtgtacccctgttgagttagattggtggtttaagaaccacaggcttggaaatggtttcacatagaacttagttgttcctcttgttttcaaagaccaaggtggagctcaaagatggtatgtgccctctcaccacagtgacagacaggattgaaagtggctgcccccacctctttctgcagcactgacttgtccaagaatttactgaacctcaaagtagaggatcaaattcagagagaaagaaaacattagatttgaaaaagtcagtccttgccaggcatggtggccacacctttaatcgcagccctggggaggctgaggcaagtggatctctgtgagtttgagaccagagtgatctacatatcaagttccaggacattgagaactacatagagaccctgtcccctgtctcaaaaaaaaaatgttcttaaggaaagctaaatttgtaagtagttatagtcaagggggcatttaaaatagtcttatttctactatgttccttggaaaacctaagcagcctcaacattctgttctttaattatcaataatgttgttacctgaaaatcatcttaggatgtaaacactggagtgtcacattcacacagtcattgctggaaggggcaggtgagatgttagattctcgtgaaaggcttttggcagtataaattaacctgggagactttggcatcacttctaaatgttattctctgaaataggcataggtaaggatccacaaatagagtcagttttgattcttctacctttctaattgttgataaaattctattcaaagaatttatgtcatttctgtgttctagtctgcttctctgttgctgcgataaaaaagcaaaaccaaccaaacaaaacaacaaaacaagcaaaaaaccaacttaacaaaagtgacatggggaagaaagggtttgtttttgtgttgcagattagagccaatcattgagggaggctaaggcagaaactcaagactgggcttgaatcagagactctgtaggaacactgcttactggcttgctccctctggcttgctcaactgcctttcttgtatatctcaggacccaggggcagcacagctcatagtaggctgagctttcccacatcattcagatttcaagaaaatgccccatagacatgcccacaggccagtctgacagagagaggcaagccttcaattgaggttccctcttcccaagtgtgtcaacttgacactctgccattgagaaataacattcttagtgtttgtaaagaatgaaaacatgaattggctgtttacacaccccagggtcccttttggatcttatgctccagttgatttctctctctctctctctctctctctctctctctctctctctctctgggtaacagttacagaaaggaagaaacaacttgtttatttgtttgtatttttttctttcaggaaaaagcaagcttgagcagatgtttggatttgcatagagctttggaagaataaggctctaacaggttttctataaccaggggacctgaagatcctggttgagtatgttctatgaccttcactttaccaagagatggaaatgacagcaagggctttctcatgctcccgatagcagtgtccaattgaagtgacacaaacatgtgaaagttggctatagatgggagcttgtaattcatttccacacacaaaataaggaatgtgaagaggggagaacttctacacatgagctgacctctgagagaagctacagaagagctcagaaagacatgggatgaagaggcactgtccttgaaggggttgggctgaggaatgaggatcacatacagaaagacttaaatggccacattgatgcactttagttctctgacaacagtgccatcaatgtctgtctggtgctagatgctacatgaagcacaccacacagtgattaagagtgctgatagttaggaccagcaagatggcacagtaggtaaagacatctgatgccaacttgatgacccaagtccaacccctgggaccccagtagcagaaggacagaactgactctcacaagttgaactctgaccatcacaatgtgcactgtggcatgagatcaactcccagaaaatgtaattttaaaaaaatgtgccctgagctcagaatcagggcactgagatgctcaacgattctaaagtttactagctttttgatgaaggcagtcaaccttgatctcagtgtttgcagatgtaaagtgagaacagcagcaggacccacatggagaactgactcatttacaagtatatagtgggtaaatgttacaatacatcaaagtaccagtctaaaaagggaatgatgtctgtatttatcaatcaatgacctaagactcttcctattcttatttgaaaagttttatgaaatatattaacttatttgcctttggaaacaaacacaccagtctgaacataaataaattgtttgtgatgactaaccatcctgtgacatatcatcattgtacacaattcttacaagatggaccaacaatattaatattagtattaacaatcacaaagccagagagatggctcagtgggtgtcttacttagggtttctattgctatgaagaaacaccacggccatggcaactcttataaaggaaaacatttaactggggctggcttacagtttcagaggttttctctgttatccttgtggtgggaagcatggcaacacacaagcagacatggtgctggagaaggagctgagagttctacatcttgatccacaggcagtggaaggagtctgtgtcccaaattgggcatagcttgagcacagaagacctcaaaacccacatccaaagtgacacacttcctccaacaaggccatacctcctaatagtgccactccctgtgaccaagcattcaaacacatgagtctggggggggggcgttcctattcaaacctccatcgtgggtaaagcatctgccatgaaagtgtgaggaccttggttttgatcccctgaacccatgaaaagtcagacatgatggcatgtctgtaactccagttcccctttgcaagatgggcagtgtagacaagagaatccctgcaagttcatggtcaactagtctggcattttccatggctaataccatgaggtactgtctcaaacaatgtggaaggcaaagacagacacccaaggctgtcctctgtctccacacatatgctgttgtatgtgtatacttgcaagtgtgtacacacacacacacacacacacacacacacacacacannnnnnnnnnnnnnnnnnnnnnnnnnnnnnnnntaaagagagacaaagagagaacagagagagaatactagcaacaatgaccaggacaactaccacaaattcaaccacagtaatacctttgtgtagcacctatgttttcaaaaggctcctacaagccaagtggtggtggtgcaagcctttaatcccagcacttcagaggcagaggcaggtagatttccagcttggtctatatattgagttccaggacagccagagctatgtagagagaccctgtctcaaaaatccaaccaaccaaataagcaaaactgctcctacagaatccacaagaattctgtgatgtgagctaaccaaataccaggatggagacatgcctaggacccaggagtcctgtccagagtgtaacagctcatcaacaatctctcctgaaaatatgaactgaataataactatatactagactcccctaggaagccaattccttacaaatgggcatctgatgtgacatagtctggttgtgatttgactttgacagaaatgggatagattaagaactttaaacccttagcagttactgaggttttatgatcccatgttcacttatgtataaactcagctattcaataactgaacacatgtttgtctggctttggatttgaagaggagataattaaaaaggcattgctattatttaattgtatttccattcccagtaaacttatttccaagtcaactccagttcatgataagtaaccaaataacataaacatattggtgaaactaacacatgggtaaaagcgggcagagaagcatggacaacccttactggaaaacagttaccacatccaactcaaaaatgtgcttattacccaacaacatgagccaaagaatttctcagattaaaccctcaagtttaaccctcaagaaatgttcatggcccaaatacataaagccaacatagtctttctcagatctcatattggaaatcaggacccatgccttttcttgtttcattctgaaatcatacttaatactacatgtatgtggagataacgcatgttttttacctccaggtaatggatgtgaagtgctaccactaaagtgttataaaatactaaaatttaactcaaaattgctccctctgaggctgagggctaaagctgtactttgggtcttttacaaccctctatctactttttcatgggctgttcttgctgacaaactcatagataaacaaacggcccaggggagactataatgagatgaagtcatgccagaaatgaaacacatctgtgaaagaaaagattgtacaagaaagctaggattgagacacacatatttttctcaatagctcgtcactatatccttgccttattctactacagcctatttaaaaatgtggatgccagtacttctatgatgaatagggctcacatacctgtcagtcaaggtattaagaggcaaacacatgtaattatccagtgcacttgaggtatcctgtcatagtttgtgctgacatgagggcagggaaatcttccagttgcttataccacagccagtatcattgctttcccagtaccatttgcctcaggtagatatagcagttgatgtgaaagatggagtgggaggctttagtcacccaacaccaagaacatggtgttcctgaactttaccttcaatggaaggatgctccacacagagaatgaaagattacagggacttaaaaacccatccttcctgaaaaatgccaacacactgctgggccacactgagacctttggaagtcatacactagactggcagctctctcccaaatcctctgctgaaggactatagactggctgggcacctgcaacatcccacacagccccagggtctgtcctagagcagaaggagcaggggaaacaagagggaacagtgccctcttttccacttcagttgaaccaatgtgctctagcttggctgtttccattggaggtaacatgcctatcttctctctttcctccctccctccttttttccctccctccatccatccatatatccatccatccatccctttctatccccctcctttcctctatttaatagggtcccatgtagcccaagctaatgtcgaacttactacatagctcagcctaggccagccttgaattcctgatctatctgcctctacctcctaagtgtggattacaggcatgtacaccattactatgcccagcgccttttctgactatttaatagtcacacagacatttggatcgtgaggaaaatcctgctttttctctgctttctctcattacttatgaacaccttcaaggtgacaggggctcaagagactctggtgtatgctgtgataactacagttcctcatacttttcaaccctgctttccagtgtaaaacagacttgctccaacacagaagtccatactacactgataaccgccctgccacaggttccaaagtttcaggggataccactattggagctattgaaggagaagataccattattaatgttttttttatttagattatctcatatagccaaggctaacctcagatcagatatgtagctgaggatgaccttgaacctctgatctgcctgcctccacctcccaggaatgagccaccatgcatgcctagtgtatgcaatgttggggatagaattcggggcttcatgcatgctaagcaagcactccaccaaatgagctagaagacagcatattaattaccactttatcctctgctgttacggaacacaacctagtacataccaggaaaacaaggaacttagaaccctcagttttcatttctagaaaaaactcaaactgaggggtatttgtagggaagactgagtgatttctgaccctctagttttaaaaacttacagtgtgatcaagaaatacctcagattaggcttcaacataagttaacacattattgtatttccactctgaaactgttagcactttaaacagagaattcagtaaatgactgcaaccactacaaatggcatggactctatttaaatgaaagggcaggtgacctaagtattatttcctctaaacagtctgcacaacatgcaaagagggaatctgagtaatgccccatgtctactgattgtctccattcaagtagattgtgtctccctgtgatgtgactcatagaacaccagcgactgcaggggtgtaggctgtcacccagcacaaagcagcctggagtaagctacacagctaacaggctacccaagcctgaaacatattcaagacccgtcttcagtaagacaaggcccgggcgagctccggggtgacctgacacatgaatttcaaagcatggcaagctgttctttccagaaaatcattttgtttaacaaactctcaactgaacccctaactagctacaatctataagggccttttgtctcaggcttcacagctcagctgtgtggggctttctctgtagtggtaattggtttggctgtccattccacccaccaggtgatagaaaactatcaatcagcataaatgcaatgtgagggaagtctctttagccaattagtcagtaatgagaacattagccaagatatcttctgcagagggcaccttagccattccacgagagtctgaggggatggcggtccctgcgtgattaataaagatcacaggacacttaagacatcttacatgggccaagaagaaaaccagaaacacttggaagagctatgttttcattgttgagtccttcaagccaacacaggtgaaggactggggctggggggtgggggatagaaggtagggaatggcagggggggggggtggcgtggagggagtatctctggattccattcccctagttacagataagacaagaatgcaatgacttgtccaaggtcaacaccttgatggccaagtgtggttacctgtaatcagagcatggggaagatgaggcaggagaacagtagtgaacaggaggtcaggcacgagttcaaggtcacatagcaaggccctgtatcaaaaaactaagaatgagggcagggagatatacctgtcaacaaaagtgcctgccacccaagcataaggacctgagctcaacccacagtgcccaagtaaaatgtaggcatagtggtgcaggtctgttaccccatctgggggaaagaagtagaaacaggcagatctctggagctcattggtcagccagcctagctgaagttatgagccccagatccagtggagagactttctctcaaaaattaagatggggagcaatggaggaagacagttgatgtctcattgacctctgacctctacaagcacatttataggtacacctgagtgcacacacacacactcaccaaggactacggatgtaactcagtggaagagtacttaactaccgtgtacaaggacctatgcttgatccccaaaacagaaaaaaaaaaagtggagcctgcagaaagcagcaaagatgaccgtcagtaatagagagaattctccaatacttgtgatacttccatatctgtgtgtgtgtgtgtgtgtgaatgtgtgtgagtttctatgtgtgtatgtgtgtgtatgtatatgtgtctgtgtgagtgtgtctgtgttgtgaatttgtgtatatgtgagtgtctctgtgtgtgtctgtgtgtgtgaatgcatgtgagtgtgtctgtgtgtgtaaatgtgtgtgtctgtatgtgagtgtgtctgtgtgtgtctgtgtgtgtatgttggtctcgagtgaggataaggattttgtgtgttacttctgtgactgctggggcccagcatgatggttttgtgtcttgagaaagtaccatatatattaagatctaggcccctgatgggcctaccacgtcagctccactaagaagtagatatgtgacttcagacaagtacctgtttccccacatgtaaattgtgcataacaatagtctccaccttccaatgctgtcctgagaattcagtacatctccacaaaacacaaggactagaccttcacatgccagctcgggtacaactgcacagggatgtgccttggggagggtgacgtcttaatgtgcaggaataataaccaggtaagttaaagcaaactaaacaatgctgcaatgttccttggcaggatggtggtagaaaagtaaactccaagagagacagccaaggtgaggctgatgaggttgatttgtggctggatcactgtcgcttcaggtgacattgccattgtgtcccgacctgtctgctgagatgctttctagcagaaccacctggcacagtaaggttctgtccccaccctacctaccagccaaggggccagtaacagatctttatcccatgcacacagtagcctcatcactccatcggagttaccatgtcctggacttgatgctgatgtcccctttcccagaggcttctacatctactcctcctactgagcctggcagctctttagacatagtgaggcactatgctgtattgtcactgcttgctgtgccctatttgtgtacttcctacccttcccagtgcctcctaaatgcagggccaggcagattttgacaaaagggccacctcagtgattgtcccaatggaacacatgccaaacacaggcaccattttgacatggcacagcaataaaatgtctttctaggcatttccttccgtccctccctccctcttccctttctttcttcctttaaaggggaattttctctatttcccaggctggccctgagccaccgtacttaagctcagcatggagactataggcatgtcactcacaggctcagagaaaaggaagggacacacctgcctctgcctttgatgggctgtgcacatctgtctcctatgaggggagacatgagacaaagccttacaggattctccaaggtcaggatgtgttccctctttcacagctggtccctcactcaccgtgctgagggctctctgtgtcagtgattggctacagagcaagaaaggaaagaaacagaccttgaatctaggaggtccaaatcaaaattgcctacctctctagagaaaggttctcaatgtagttttcagccaccaggtagacttcctacaaggaccaaccttcaggtagagaaggaggaacccttccacgtgagagacatctgcagcccctccgtctcctattcaggtcagtattgtggaggcccatagccatatggtttgctacagcccatctaatcctctgttcaacaaaaactaggactttcaaagcatgcccctctaaaatgctagtcaaaggacatcattgcattgtgaaaacagaaaatgtaaagcagtccagagagaaactgccatatttacaccttttgtactggccttatctaatgagagcaggaaaaccagtgccaggagccatctcttccttgttttaactagggttcacacacatgttgtgtataataatagtattcttcactgttacataaacataaacgatcacaccccttctattcttcagacatcgtgacagtccgagctaaaacaggtaactcaactcaagtccctgaaagcacagacaattgctatttatcaagtggctgagccattacacttgcctctgacacgaagtctttagaacttctgtgggttacaccatctgatcatcgtgttgtgatacacagttgctagtttttaagcttttaggttcctaatattcaaattaatactttactttgtcttatagtgacagattttaaatcaccaattccatataaatgcaaactgatttatcccaatttccaagaggtaaattatactattgtgtgattggatcttagaacagcatgaaagagcatggctacacacacagcagtagctcaggctctgtgggcaacaaagtcacaaaataagagagctgggagaaagggtatatggaggtagatgacaacggtataaacgggaaggctggatgatgagctactcaaaatcaaacatacaaaactgaatcctgacccttccttccaaaagactaaaaggtctcacgtccagcattgttttaaaaaaaaatctattctttaaaaaaatgtctagacaatcacacacacacacacacacacaccacaaaatctggtaaggtcgcaattctgtcattcacaaagatggactttttgtaaaactacatgtgtagctgtttcttattcaagagctcaataaataaacagctaatcttcagggaagtccaagtgcaaggtcttcttcaaacacctcttcactcacctcatccctgcccccaagtccagtgaagtagtaattgtgttttactaatagcatgtgaataacgtccccaaattctacatgcagggcatggtggagctgggattccaaccagggtgtctgtgactccagacactgcatcactgaccattttattaggatgcatgtagatggatggatggatgaacaggtggatgagtgacacagctatagtggccgtgtcttccctgcggcttgaagagctgctggcaaagctgcgtatactttttaaaaagagctgggtaaataaccacacatagtccttccccatagcaccccagttttcatctacagcaccccgtttcaaaggagcaatgtcaaaagaaatgttggtgtcttttttgtttccagtcacacaaaagccacatgacaacagtgttgcagggatgtgagggacaggaggaagacgtgtgggggaccgtggagcttcctgtgggccccgggtgcttcctgttagagaagaaacatctgtcccgctgctctggcacaaactttacatacaatctcaagtttcagttagtggtcggtctccacttcctgtcccgaactattgggcaagacttgggcttcactttcctgagacctcaagactagggtagtagaatgccttgaatagctcagtgcccaccaggttgggggaattcgggcaagaaaaacaggtacacctgtagggaggtggcaacaagttattcagatacaggactgtccccagacatgccacagcactatggacagggcacactgtacagactctacacattttctggttggatctcttcttctgctgaggtctattaaagccatattcatttacctaagactctgttcagattcttccctcactcattgtgcagtgtatttgaagactttactatccaaaagcaacaatgtgttgttttatttttattattatttttaaaaacatggcagtggaaaaagccagggaagataatattgttgcatttgcagaccagtcatctggggcatttgtgaccagacagaatttctggtggttttggacatccaacttcctcacactctctcccccttaccacatatacctgagctagtaaaaaattctgaaatgagaacattggaaatatccaaaagccaccagaatttgtattttaaaatcagtgttggccctggcacagcttatacaagtatgcacagtgagtctgaatcacatctcttgtgcccaactagctctagcccatgagagaattcagaaaaagacgacacccaatcatcttaaaatagagaattgtgctgggcagtggtggcacacacctttaatcccagcacttgggaggtataggcaggcagatctcagagttcaaggccagcctggtctacagaatgagttccaggacagccagggctacatagagaaaccctgtcctgaaacaaacaagcaaacaaatatatgtatagtgaatcatgacaggtaagacacactgggaggactcattcaccaaatcaacttcatctctatggagaataagtaaatacaaactcattagggtagtaaactccaatatgtaaatagttctgacatcactcttagtgctaagaaaaacacacaagctcgttgatggatatcttgaaaacactaaagcaaagagagttgctttctaatatgctccttgtgaaaaaggaaaaataacacatatgccattcctttttcatagagatgtcttaagaagaaataagtaatggttaaaaatacttttggttctgctgggcaagtcactacccaatcccaagagagttgggttttttttttttttttaaaaaaaaaaagcaaatagagcagtatgttttctacagtttcagtgaggctctgggcccaaaatgttttaaaagcagaaaactggtaacactagagatattgtcaaaatacgtttccctctggctcggaaatggggagagggagggctagaagggtggagtgggaagggattgtcgtcaaagcattgttaatatgaactgaattgcaccacaaaggcgatgcttcaacatggagaatgaaaattgttctgtattatcatggattgacaatatgacaatcgttcattgaaaatgggtgacagctgtagcattatagcttcgtgcacaaggcaagatgaatgagtgttacaagttcttccagaatgggcccctatttcacaagagtccatctcttccccaaataaatacacgccagcttttcactatctcagcaaatttagcatctctttacaaagcaacctgctaccagtggcctcaaagtgccaatgtcaagtccctgcttggaggatttgcagcagctgggaaatgccaagtcaaaatgccatgcaagatctatccatctcctcagcagaggaaagggcaagagataggaaaatgaccatgcccagatgtatgtgaactgacatcaaactacccccagatccacgggagcagtttctggtatcaggctcaggacactatagtggtagggatgccatttattccaactcactaaccaaaaagaaataacattatgcattattcatgcaaccttatgcctcttacaccaactcactaaccaaaaagaaataacattatgcattattcatgcaacctaaaagaacatactcaggtagaggtagttgcactagtccttagctatgacagaaaccagtcctgcttaccgcacacgcacacacacgcgcacacacaccggggtggaggagcacagaggcaggcgaactggagagacagctcagttggtaaagcatttgtttatgctacaagcacaaggacatgtgtgcaatctctagaacacacataaaaacaagccaaggtggggcacaggcatgtaatcccagatccttgggacgtgacagtcagcctggcttaattggtgaattccagtgtccaatgagagacttttgtctcaaaaacaaacaaaaaaaagtagatggattatacctgacaaatggtattaaggatgtcttcttggcctccacacatatatattcttacatacatatgaacaagcacacacaagtacacacaaaaggcaaaggaaaaaaaagacaaaatccacatacaatatgaaaggaaaagatatgtccttttcacactcagatgttagtatttttatttgtagcttcaaatgcatctaaacacattttacagtgtatctctgacaccttaaacacattaatgggatatggagatatttggagatgtgtatacatgacaaaactaagttaaattatctgcttcctgtaagacttacacatgtgtttggagaaacatgcaaagccatttctcctacttttttccaacagacaatatggaatcaccctatagtgcacaacaccctacaacttcttgcctcttgctcttgcagcttggtacccactggtcagcccttcttctccccaccatcttccaccctcatagccattattctgttcccaagttccacatgtctttaaaagacagaatactacatgctttgttctgatgcttgcttttcttaaacttagcaattagaatactataaacatgtttgcatctcaagtatttttcaatagaattccaatggtcacagatacccttccccctacacatagcacaaagcgcacaattccctattgttggacatttagactgcgtccagtgtttcacagagaaaagtaatgagactattacatcacagaatacatttgtaaaacctgtacggattgtctgtgatcctgatgcatcagagacactctgaaatatgggagagaacaagtgaggaggtgtcaacggtgagcaggctctctatcttgaatttaaacacttaccccacttggtccagttttctccagttcaaccgaacagtctgtcttggggaaggagtagaaaaactaatatatgaaaaggaaggggaattctgtggatctcctccatgcttccaaattcatttttaaacataaacttcccctgacacatttgagtaagctgacggagttactgactttactctgtgtatttccagccaccttctaggtatgctacaggttcacagtagaactgcacctcccaggtctgtgtggttggctggcatcatgggacttcttttgaattgtgagtggaatgacaggtagtaacctccaagattctctcttgtcttacaaaccccagtagaagatagtggttgggtcggtgagaatgagcccccgatttaccatgacaagtagagtccctatttccccatgagctcacagcaagtatgaacaagaggacaattgttgtctaaacccccacttcatttattagtatgtatcctcacttctcctgcctggccaattcaacaacatttagctgatttctctgtgatctcctggtctaatctgaaatgttcacaaaaattccaatcttctctattcgtatagtttgaaaatgtggcaaatgacaagagagaatttttcaggtttccagagttcattacaggaggtattttctctggtggcaatttggggaatggagcacttagttacattgttttagaaaagtctctggttctgctagtactattccctgtaagtctgtactagaaacttttttcactataggggcctggagatgggaggggggggctgccttaggtgactggggccactgcccttggaaatggctgatggtattctcatagaaccctgattagttctaatgacagtgaggtgctattgagcaagcttgacccctaaactttctggggggttgcttgcttgcttgctttaaaaaaaaaaaaaaagaaaaaaaaaagaggctggcaaagtgacccaggctggccttggactcactctgtagcccaggaaggcctaaatcacaatctttctgcctcagtcttctaagtagctaggattacaagcctgtgtcccccatgcactcacaccattgctaccctattgatcatgaagccttcactagaatgggccagaggagatttggtcacactcacaaacctccaaaattaaaagcactgtataacctagctggcctagaacacattaagtaaagcagcctgcccttgaactcacagagatctatatgcctctgcctccccagtgctggaattaaaggtgcatgaaaccatactgggctgtaaactttaaataactttttaaaaatttgttttatgtgtatgggtgttttacccatgtatatataagcatactgtgaatgtgtctggtgcctttggagatcagaagaagaccttggattacctgaacctggttatgagctaccatttgggtactggggaccaaactcaggtcctctgcaagaacaagtgctcaaaatcactccaggcccagtaaactacttttagtgaatcatctagccttgtatattttgttatggcaataaataagagggataatgaggaaatgtgaagataggaaggacaaaactctggccctaaataacttaaaatggaggagatatagtttttaatattccacaaagtaggcactgagagttaacaactggactgcagagggtacctgggccaggggtgtcgagaactactgggctacaagggtggctgggtgggtgggcaatcagactacatggggtacctcggcagggttcagtctgaaactgtttgaacagcaagctcgttgcatgtcgttttgtgcttatctgaagtggcatttcagggatgctgaagggactatgagatggaggctagagacatgctctatctctatacagaggctaataccaggctgctgctgctgctggcatgaccaagaatgtaagaggttcaacccagaggagaagatacaaagtaccaaaggagaaggaaaagcatggccttagtacttgagaagactggcagaaacagagatggctcacagaggaatctgagatgtgcttgtgtggccaagatttccacaaggaaagagacagcgtggaaggagggcactgctgaagtgaacacacaccagagacaaagcattacaaggatcagctgtgcagaacaatcctgcagaaacatcacacctagcgtctacaaaggatatcaggcaagtgtgaatcttagggcagaacacctagggacttagagggatttgtgcttggcctgtggagttaggagatgggtgtgaagccaggatttgaagcagggaattctcaaccaggaagaagagaagaaacagaacaggtcctcgcaggttcccttggcaagagcatggcacctatatctgagtaatgaagtcagagcctgattcccagatcagctctgaacatggggtgggggtagtataacagagctgagctgaaggagaattcgctggttggtccttttcctttccttttatttattttaaactccatagcccattttttggagcctcactttgtcattcataaaacagacacagtagaagacaaagatgttacatggacctgacattctaggacctgtgcacacctctggtttagcctagaagaaaccagaagcaggtagaacaagattcgtcgcgagttttgtcttcaaatgctgtcaaggcagcaggccgcactggctatctttgctcttcagactggaagggaaacattccagttcctcaacctttgtaaacatttcccagtggaaacccttcagctgaatctcactttagctgtgcttccttctccgaaagccatttagctttgcttcaaacaaaaagacaaaaatttgtataaaggcttggaaaggcagatggggagagagaagggcctctctctgtggaatcccaagggaggggtgggacagacttcatccttttgacagtgcacccaaatggcaactgcaggaagaggcaagaagaaatgcacctagtgaccaagtgaagcagcactcagcaaaaggccaggggacaatcaaccccacacaagaaggctgcttgtacttgagctacaaaagcagtggctttctctccttttatcgccaaagagagcaaacatgctccatgaaatctgtgctgtcctaaggtcagatctacaaagctataattatccaggtaactcgggtctgatgtttctcaaaatatccaggtaattataggagaaaggtcatttcctctatataatatcaaccctagaactggctgtctacgctggcagttttccagccgagatctgcctgtcatttcattcttgtagaacaggctgtctacgctggcagttttccagccgagatctgcctgtcatttcattttgttcttgaatacaatttgctgaagactaagaagaatcctaatggggacgttttaaaaattacttttgtacgtatgcctcttccttcaccctccaacccccacgttctgatgatgtcctcacaagatggtatgtgaaaacaccctctgctaatttttaacattcaaaggaattgcattctgggaagaagatattgtgagacgcaaaggaaaggaggaaagtgaagaggaggaacggacagagcggtcccaaggtctccaaaactgaggtgcttaactgctgggccctttccaagtaagaaagagcaggagtctgcaggtcaacaaccagcttgggctttggcagcacgggtagtttggggacaggaggaagcgcatctgcctgaggaagccactgttcctttgcttcacaaaggaaaaaaaatggcatttatcccaagtacagcagagcgtggtaggattcgcctcccccatcctttcttccctcttcctcctcccatcgccctcgccgccgccccttcctgtcggaagagaaaaggtgggagggggaggaggacccaccggtcacagtcggcgcggtgggattctctttcttcggcttttaccagccgatgggggtcaggacgctattggttcagcctcatgtgcgagctggtgcctctcgcttagcaacagcgagcagcggaggcaggaagcaacgccacctggccctgcgagtgtgcgatgctttaaaagggaaacagaaggggagagagaaagagcaatctagcttaacatattgtactctcaagagcgaggcttcatcaggctgctaacgacggccagccaggcaaaaagtggacacagctctgtcccatgggcatctctgtatcaccctaggtagtccacacgtagttcttgttttaaagaacaatctactgagctgcatgggaggtgggtggagagacggttgtctgagaggtgggggtgaatccacaactctcagagagttcagtcagtcttgatttgttttcacaccagggtattactagaaaagacaaagtaaaattgggtgtacttgaaaaggcaattggctaggtaataatcatggctttcttcgttttttttttttttctttttttaaaattagtcaacacagtagctgtttctaaatgctaaattctatcttagtggttgacaattagcttttgggagagtcgaaaatggcaaaagagaaaccctgtaaggtgtgctgtgtgtgtttgagagagatagtaatatgtatgtgatgtgaggtgtggtgtgtgtatgaaatggtgtgtgtgtgtgtgtgtgtgtgtgtgtgtgtgtgtgtgtgtctctctgtctctctgtaatgatttttgtttttctctttgctgcttttagttccaagaggtactctaaggaggctggggtgagctctgaagctctccctgtccaagtgaggcagggctccatgccagtgacaatacagaaatgcatccagctagttatgtcctttcaaagagcataattaccccttctggttctagatctccataccatactttagaaggattctctgacttgcgtacccactacaccccaattcaccataacatccaaggagggtcttcgactccaaattacaaaggataaagtatctttctattttcttagggaaaaatgtagtcaacatgggtctttcaagggtgtcaattggtgccccaggacaaagaccaacactatggagggcacagatgggctacacccccagcactgtctcacccagacccagttaaccccttctgtgctgagttgaagaagccactgactatagtgacacctactgctcaagagcagttgtacatcgttctccaaccaggttctcaaaggcagccatttgctccactcccagacaccactgcacacccctctcaaacaggctggcctcagtgcccaacactcaggcctcctatgcagtgatacaacctcagcagagatcctccacaagaaggacagaaaacaggttgataaacgtccgcaccatctgcagaatcactgcttaggtgaaaccatgctattcacactccaggaaccagactggtttcttctgggaggaactgagtacacgctgaatttcacagagaactcacggagtaaagctctagtgctaggaacagggttcataggaactgctttccacgggttgtaggggagacttccagctaatctgtatttctcttgtcctgtgtagtttgtcaggtgccagggactccctcccatttggaggaagaagccatttaattaggaaagcaagttacagttttctaaagcctagcaaaacgtctgtgctgctggcaacaaaatccccaagtgcaagggtcctgtttccaggtaagatcagaaacaacaatatgaacaatactggttacacacatcacaccacacacacacatcacataccatacttacatatcacattccatagtcatcacacataacacacacacacacacacacacacacagataccacacacagataccacacacagagacacacacatatacacacatcatacacaccacacatacacacacacacacacacacacacacacacacagataccacacacacacactgtcaaaaaggtactaagcttaaagtcatattaaaagtggtgataacagctggcttgggtgatgataaacagcggctcaggagttctggctcctttcatcttgagcaaagactatgcaagaagccttcacccaaagtgactgcttgatgaacagaacacatagcaatgcaggaagctcaagcatgaccacatatttggctttttattcccaaacatctcacccaggacaactggatattgggccttaatacatactctcatttcccagacaggaaacagcgctgcagttcactcaggattccagagcaagccagtggaagctcagagggctcagactttctgacttaaacctgcccatggcattgagccaccagagccaggtgcctactgtgagcagcctctctcatctctgtgtgttcatttgtgccaatgtttctgagtcactggtgtcctgtttacattcctcatgaagcttgccatgctttcctgaaatgggttaaagacaactaatggggatgcagaaggctttagtgaaacacagaaggtttcaaacacagggaaaatggaaggctgaacctgcccacccacctgcatttgccaaattctccaatgtctaaacacggaagcatgtggagagtgaagagctactcagaaaggaatcatactctctctccaccgagacaccgatccacaaggtggtgctgccgggaggtgggggggttgccagctcagaagactaattaagcacaactgtgatggtttctttcttgacatacagtggtagaacacacctggacacaagtctatgtgacatgtgcagaacaaagcttggtttgtgccatgggtcatccagcccatgtgtgagagtctatccagggaggtgacaacgttaggaatggcagcctccaaatgcccctcaaaaacagctttcaaaactatttttaaatctctaattagtttcacttaacagggaagggaaataagcagtgaccagtgtatatctcccttgtccttttcttttccagaaggttctaagcatgaggtttcagtgagcagcactaccctaactgacaacacgtagtcccttcattcaaaatgtcagtcatatctcatggcgtcaacactaagagagaaaggtacatagtgaggggctacacagtctagctgtcgatagctggtggctctgtcacagcgctggcaagatacaatttgttttaagaacatcacattcctgggaatggagggagcaccttggatgtaccccattttgctcccttggagtattctagaatgcatcacacctggctctgcttcttgctcccaagtcaggatgtctatttttggagcacagtagcatacacctgtagtcttatgagtgtcacaaagcttgtccttgcttttccccactgggccctctggcttccagacactgttgatccttacagccagcaggagctcctacttaagttaagcatttcaggccctccagcctttgttacaacatggttcacacagtcccaccaccctgtatgtgcgggggttgggggtgtgtgggggggagcgtatatgtatttatacacgtgtgcatgtgtgggtatgcctcaatttaagttcatgtagggcacaagttaacatgaggatgtctttccccgttttccacctttttttgtgtataaaaaaatattttatgtgcatgagtgttttgcctgcatatgccctttttaaaaattttttcttaaagtgtattcatgttttgcttgcaagttgtttgtccatgtctggcccctgaggaggaaagaagagggtgtcagctcccctggaagatacagctattcagacatctatgagctagcatgccggtgctgggaactgaatccaggccttcggaagaacagcagtgctctttaaccaatgactccatgtcactccagcccccaccaccctggtttttgagagagtctctcaaggaaccagaaggtcacagattgagagaggagggctggacaatgagcttccagagatccacttgtctccacctctccagtgctgggattacaagcagatgtagctgcattcaacctttttcaattaagtggtgggccagtgatttgatcatgggtcataatttggtgactttcaactacacatcaagcagttaaagctgggggtagggaggagaacagcatgatttttttcttcatttcttttctttctttctgttttttgtttgttttgtttgtttttcaagacaagtttctctgtgtagctttggagtctgtcctggaacttgctctgtagaccaggctggccttgaactcacagacatctacttgtctctgcctccagagtgctgggattaagtgcatgcgccatctccacccggcttctcttcacttcttaataaagatttctacggcagtaccaggctgtttttatcactacagttctgtagtataacttgaggttaggtataataatacttcccagctgtgttcttactcccaggttttctttggctacccatggtcttttgtagtctacatgaattcttggattggtttttccgaatgtgtgaaatatgacatcagaattttgatgggtattgcattaaatccataaatcaatttaggtattataaccattttcacaattttaattctgacagtccaggagcttggaaggtcttttcattgtttatcttctttgattttctttttcaaggtcttgaagttttcattgttgaagtcttttacttctttgattaggtttattcctgggtactttatttatttatttatttatttatttatttatttatttagaactattgattatgaatgagatatttcccctaatttatttttctgagttcgctggaagcacatacatacatacatacatacatacatatatacatatatgttaatatatatttatttatttattttgaatcctacaactttattatgttcactagatctcaaagtttctaagcagattctctagaaaagacttgtgctatttatgtgctacttacgaacaaggatagtttgatttcttcaattcttgttttcatcccttttatgtctttcccttttttaactattataggtaagagtttgagcccaatattgaacaagacaggggagcaatggcttcttgtctgagttctaattttagaggaaattctctcagtttgcctccttttagtacaatgttagctttaggtttgttacatacagtctttatgattttgagctatgctccaactactcctaatgccatgacagcatgttgaactttgcaaaatgcttttgtggcataaacagagatgactgtgtggtttctctcttaaagtttacttatatggtgtgttacttttattggtttacatatactgtggcataaacagatatgactatgtggtttctgtccttaagtttacttacatggtgtgttacatttattggtttacatatactgaactaaccttgaatctccaggatgaagctcacatggttatgaccttagtgtattcctaaattcagttggcaagaatttcattgaaaattttttcagctatgttcatcagataaactggtcatagtttccttttttatgatagcaaagaaatgaacccaatctagatgaccatcaacaaacgactagataatgaaaatgtagtacatatgtaaaatagaatattattcaactgtaaagaaaaatgagatcatgaaatttacacgaaaatggatggacttgaaaagtataatattaaggtaggtgactgaaactcagaaagaaaaccatgtattttttctcatatggatcctagtttataatatatacaagtatgtaggttaaaaaaatggaagtatgggtataatatgacatttaggaagaagaccaagagaaggtaatatcaatgatgaaaaagagtagaaatgcatgcaaaaaaatataagtcacaagagaagatattaaactaagaatttgtttcagtttcaactccgacatagttgttttgattgtttgggtgggtaagggaaattaaaaagtagataagccagacagttgtgggaacacatttattcccagcagtcagaaggcaagaggcaggcagatctctgagttcaagagtgagctccaggacagccagggctacacagagaaaccctgtctcaaaaaaacaaaacaataaaaaaaaaaaagtgaatagtgaaagtgtaaaaccctaagtgatgctcaatggcttcagaatggccattatgcctatacagaagttcagtgagatacacagagttttaggctaggccattgtttgaacggcttccttaaactagtcagtgctgttcttatttgtgagttaatcagaacaaagtgctttcactattttattttttatgttccaactttcttcaagattttcttacctatgacagtatgaagaaagcttcagtcatgtggcgtcattcattggctagtgtagaatgtatttaatctagtatcctaatcagtccatgagctcccagcaggcaggggcccttcaaaaccatccatgatctccaagacaacaaggactctccattgaagactctgtaagtactggagagccacctatttggtcattccatgtgaaaatacagctatggaatttctttcaactgtagagtatttaataaatattttggatcagcagatggaagctagaaagacagaaattttgtctttatgtgtgaaaatattatttttttaacttttagaactgtccaacaataaaatatgctgcctcttgaaataacacatttcctgacaccaaaaagtattcaaaacacaagtgtatagccatctgtcagggattctgtagatggaattcctgtattatttaggtcagaccacatggcctccaaaatccattctcactcaagaactcgttattttgactgactactctccttgcctctcccaggcagcacatttatctgttaaaattaagtgattcagtgagtttgaggccagcctggtctacagatcgagttccaggactggatccaaagcaatacagagaaaccctgtcttgaaaaaccaaataaataaataaataaataaataaataaataatttaaagaaagataggccatgagtttacaccaaagatgatcaaatccttccttgtttgccattttttgataaagtatatggatataatattaagatagcattcatttgtttctttcaagatttaggatatttgccacatttccaacagtaatctgaagaaaacatcccatagcagtaagattttttttgcccctatttgacagctccctgaagagggtctgctccttgtttttgtttattttatttgccttgtaaaaggctgctggagtggagccactcatcaactgcctaaaggatgacatgttaaataaaacagcatctccattcctcttgtcttaactttaactttctagaacctgtacaatcttaggaaagcactaaattgaaaaggaacttaaaaacattcttacctcccttgtggaggtaaaaatatgattccctgaacacgcaattccatatgactataaaaccccacaggttcaaaataacaagaatgtcttcctttgagttctcatagagcaactaccacaggctagacaagactgaaagcaccgggaacagtaagcagaagacccaatttccatcaatgaggtacactggccacctaacaaagggccacttccttgttaaaaaacaaaatgggtgggggtggttatactgactggttttcagtgtctccagtgccatattaagccttcattcagttcagcaaattaaccagtgtttgaaacaaggaatgagctccctaagtttctgatcccaactcttttcagagggtgctgctccactgagggcacacagtgtaccccccgctaacctgtcatagtctccttgaatgattcaggaaagaataaatcacacactgtatcttctgatcctaaacacaggccagcactaataataatgtcttacaattattaagcaattactgtgtacaggcaccaaaaggatggtaaatggtttttaccagcaatggcatcaaaacagaagaaaggttagaaacagcccttggccagcaagactgttcaaagtcggtggcaagaatgacacttcatgagggtttcggggaaaacagcactcaacagagcgaagcccagcctggtcggaattgctaataacatctcagaaacatggcagcttgctattcctgttttcttaaatagaagacatctcatggatgtccatcattggcataaatgtcagtaatagacatccattcagggtcagggtctaaaaccaacagagctctttgatcttactgttggtctaacagacttccagtaactgactcacaactcagcttttcttcctgttctcttctgacctacttctcatggctgttgtcctgtgatcgcaaaatggtcacatgctttgtcatggttaaatgtgaaactgtcctcaccccaagttggttttttatttgtttgtttgtttgtttttcatttctcgaacgcattcccagcttccagatggtggagactggtaaagtaaaagtataacctcattacatgcagagttactcgtgtgatctttttctttttctttttctttttttcttttaaaactccctttctggaaagtcagaatacagtctagagaagttttattttattacctgccaaaataggtaccatattttaaaaagttaaatattaacccacaatggaacagggggaaatgatgagtctttagtaagtaaaagtagcattaagttttcccttgaatgctttatatttggtggaagaccttcaagtctggaaggttagaaaagcgttaatttaggctagtttgttaccaagaagaacctgctgctaccaggacactctctccctctgcctgcttgactgctgtcagtgagtggaaagcagatagcagatgctgttcgtctctgcatcctgcctgtccgggtcttatgacgtctggtgtccatccttaatgcagcttgagctcactacgatacagatctctacaatctcattatcttaacctactccctttgttgtcttttgccatttttcaaactgtttttgttgttcttcttattgctgttccaacaggcacaataaaacttctttgtgtaaattcccagcctttctgagtaaattctttggatgtaaacatgaattatcagtttgttaccaagaagaacctgctgctaccaggacactctctccctctgcctgcttgactgctgtcagtgagtggaaagcagatagcagatgctgttcgtctctgcatcctgcctgtccgggtcttatgacgtctggtgtccatccttaatgcagcttgagctcactacgatacagatctctacaatctcattatcttaacctactccctttgttgtcttttgccatttttcaaactgtttttgttgttcttcttattgctgttccaacaggcacaataaaacttctttgtgtaaattcccagcctttctgagtaaattctttggatgtaaacatgaatcatcatgttactaactgaatacgaaatctcagcctgaagcagagactaaaggaagtacatgaaaaggggaatatttatgcgtcacggagaggggagtttggggatgctctgttttccacagaagcctgcatcctgcatgaaaactctggtaaaaagaaaagaaaagaaaatctttttttcttcatgtgttcggcacagttctggtaaaggagattgtcttccgtcctgttttctctcattgctaacactgtccatgtgcagaacagaatcagacaacggtgctcttgagagctcctgctgtttctacttgaacttcactttcatttttgaatctttttttatatttggcattttttcagacattctttgtcggaaagaaggagataagtaggtaaaccatcatcagaagcttccggaacaagaaatgaaggaaagaaaacagtatctcctgcctgtctgaccagctgcaatgcccctggcattgtcacagggacagaacaggaattatacaaatacagcccgggtctgggaagggtaggggactgaagaaagagaagtgttgtcgaatgggcccaaagcacagtttgataatgtgattcagtctggcattctagagcatcatgaagtcaattattagatattttgaagtggccagaagaaaagatcttgactactccccaaaaaagaaatgaccagggtttaaggtgatggatatgacaagtactataatttgatcactctgtatccacatgaagaaatatcatactgtagcccatgaatgtgcacaacacttctgtgttaattaataggtaagtgcctcataggaacattgaaagattccaaagaaaacatttcctggaggaatgcctattggcagagaagatgttcttttcctggaggaaattcacatccacttctgtgtcttgacttaggtaacctggtaacccacagttcctaaaagtacaaataggagcatgtgtgaaattggtgatttcagtcaaacaccaaaagaaatgctggaacatcctaatctggttcttaaggaaataaatacattcttattataaaaataattaggggctatgggattactcagtgagttaagatgcgtgtcaccagcctaataacctaagttccattcccggtggactcaggaaatagaaggagagaactaacctccacatgtgaatcttagcatgtgttcccccaacataaacaaagatttttaaaattcactacttaaaatctttttaaaagacataaaataagtagctgtatgttcaaaacagggattaccatatgtgaaccagaatacagcctatggtcccattaattaatttgtgtaaatataatgtaaagaatcaatccttccagaggctggttggtagattggccttgataatttcaagtttgtttataaaaagtagtggccaagaaaagagatgggaagaatattcaaagatgtttagttttgtagaaactatcagggtttctattgacattgtaatgatgaagtcaaatatgcatcttttttttcagatagaaatgtgaaagatatctcaaatagaggtgcaaatgctttgcttcaatagagcagtttgtagacttatttggaacttcaaagatccctaagtttttttgttgttttatgtaacaccaattgttattttacactgttaaagttctggcaaccaatagctgggatttggcaggaaatgaatgaatgaataaatgaatgaatgaatgaatggcaggatagcctcaaaggtgacaagcctgctggttgtggtggcccatgcctttaatcccagcactccaggaggcaaaggcagaggcatatctctgtgagttaaggccagactggtctacaaagggaattccaggacaatgagggctgttacccagagaaaccctggcacaaaacacacacacacacacacacacacacacacacacacacacacacacacacacacacacacacacgagacaaacctgaactcaaagtcaaaactgtgaaccaagttgggctgacctcccctaatttaactatagttcctgtcccctgatacaggtcagtggcccagatcttggaagcattgagaagcattatttgccatactgaaggccctgggttgtttgatccctaccaataacaaaacaaaataaatcaaagatttccttgactggggcattagaacaggaatcactcgacagtcactgtacatgcacagaaagtcacttcaaaggaaccagacactaaaaggaaagagatgagtctggcttatttcatgaatttctcctagaaagtatgcccctgcaccaatgttataaagcaatgtttgaatagtgctgtgctttggatatgtatctctaaaggttaaaatgtcaaaggctaggttcctggcccacagcattattgacagatggtgggacctttgagatagggttaatgggagaaggttagatgattgggggcagggcttgttagggatagaaggaaggagcagcccctcctcctctactcttgggctccccagtcgctgtgaagggagcaaccaatcacacactcttaccagtatgtactgcctcaccacagatccaaaagcaatatggccaattggtcattgaccagatccccctttgaagttcattatttgggtattttgttgcactgatggaaagctaacagaaatagtcattgcctacctcaaacatcatactgatattctaatgcccttaagcggtttgcaatccatttaagaacagacattttgtattgttcacatgcttaattacaaaatttatacgacacataaatggaaatgtatctgcacaagccactggatttgaggcagaggattcaaattctagctaaaatccaaagctaggaaaacagaataatctgttcatcgaaataggtgggagaagcaggatgtgctcagagaaagccatgtttttatttcaggctaccagaaaggaatacaatggcagatttcatatcatctggagctaccaaatggtatgcaccttcaaagcagattctgtgtagcacctacaagcaggggttagttttcaaagccctactcactgtccttctttctacctcctcaatcctcaacaccaaacctaagagccagaatttttcagtgaacagtcctcactttttactagaattgaattcaaaagaaaatgtggtcctgagtcgttaagcaggtcagtgcatcaaggcaactgatcacagagagaagtctgcacaatgaaaataatccttcaactatgacatggaaggctgcattctctctctagttaagagacgtactgcttcccgtacaggagggagattaacaagaaacaaatattcctcttagaatttcctgtacgggagaatcccaaatggtttcagtaataaaagcaatgaacacttctaaccacaatgcaaatattccagtaggccaactcaaggcaggttacaagaccaattttatacccagttaccaaaatacactgtggccagcagtaatttgtgtcaacccaggtacacctttcacctattgaatgaacagtaaggaaatataactgtcagaatggaaatgggcttcatgaggaaggctgttgtctctttcccacagggtcaccttggtccacagcttgttacttagacttcatttggtattggcaaaagtccctactagctgccagcggaacagaagaagatgacaatatggtgcctgtatatgctgccaccagagcccagtgttttgacattgttactgaaacaaactccactatttatgaaagctaagttgaatcaaacagttggtgtggcaggaaaaaacatctgtttctgaagtctttttgtttagtaaggcactacggaaggagaggaagcatggcactcacaccaacataaatacctcccaaacaacccatgtgggtagtgccatatgggatcagacaccaacccagtactcacctggcagatgtgactgatttgaaagtggtggcacatctctgggggtagttttctggatactttcaactctccctttatagataccaaaagtagtatgaatcaaatagaaaatctgcccacaatggagcatatgcttttttgtcttcttaaacagagaatatggacaggaggtgtaggtccatgttagcctgatatgtatgagaatattctagcacatgactgccatgataaaatttacgataactgccagtcatggtggcgcatgcctttaatcccagcactctggagacagaggcaggtggatctctgtgaattcgaggccagcctggtctacaagagcgagtgccaggatagagagagacatagagagaccctgtctcaaacccctaccccaccccccaaaaaacataacaataactgatcatctagaatatcatgactaagaagtgtcctttctttttttgtttgtttgctggggggccggggtgatacaagttctctttctttgggtctaaatttttgctaaatgcacagttaaactataatataccatgaggtactctctgacacatttaatatacaaatacattctttaagtcacaaggggaatcactgggagagaggctacttaagaacacacttttcaagcttcaggcacatctgtatatattgaagttgctaggaaaatgccatggtccttattccctactgagaaaactcagcagcaaactttgaatttgaataacctgatcataatccatatttaatcacacaaatggacctgtaatccttgtagaggtattttggggtgggggagttggttctataaagtgcctccagaagagactggatcaagaggcaaatgatcacctacttcataagtaaaatggcattctgataagtcactcatgacagcaaaaatataagaagcacatatgagcaagatatataaaatggagttgtaacccggccacagtcgtccagagtttcccacagtcagtcattcaggctttcccacactggcggcatgttcaagggctttgctaatttgcaagtgtagttgggctagaggaggctgcttgactttccatacttaagcactagtttattttttaaatgagtcctcagtgagaggtaaacactaaccatgatgctttgaacccgtattgttatgcaaactaacaggggcagaacctgctgtggtctgctctcagaagccccagtcctgaggagtatgcaatagcccttcccattccctgctagaaaatgccatctccctgatgcccgtctctcctcacctcaccaagcccctaaagttaaagtggaccccttaagttttctttctttgacctctcctctaattactaggttttccaaaggccttttgcaaactgctgcaagatgatgggaagcccatctcgtgataatgaaaatctcttgccaagattttcaaatagagacctttaaatcactcggatgacatttgtctagccatcattcaggctggagtaaggcagtctcaaccaacgtagccttgcctagccctagcgagtaaaggcacttagggtgcaagactcttgtgcattaagatgtcttcaccactacataccaagaccagaaacaaagcagaagtaaggagttgttttctaaaaagggtgtgctagcacagttccaaaaccactttgtgaagacatacataagatgcaaaactataaattctgctgacattatgtagtagggtatatttgaacatacaatttacttttctttcttgtataaaagaatggacctccctttttaagttttgttttgttccatccaagactggaaataaatgtaacacagcaacagagccctggcttagcatttggaagtagcatggtaaacaaacaaagtaggactggaaaaaaacagctcagttggtaaagagttcttacctattttttacaaaccctggtttcagtctgtagcaaacatataaacgaggcacagagatgtgcaccttggaatgccaggaggatcaagagttcaaggccatcattctcagtatacaatgaatttgagggcagcctgagaccataatatcctgtctcaaaaataaataaatttctttacatctggctaatctgtgtcgtactgtagtagaaggggaagcatgcaattattgtacatatcagctgtctgcctgagggagctccttctcctacactgagtaactgattccttctacactggcaatctacagcaggcctttactttcagagtgggaacttcgacatccatgactctacgctctgccaacttcaaaatcttcgagattaaacctcacccagacagtctctgctcacctttacaaccacctgagttgcaaacagagcagagttcattgtaagattctggaccctggagtttctgtattaagatttttaagccctttagaagagcttgactttcaaagtctctccatattggaattgtaaagttcatccctctttcaaaaaaaaatgtcatctgaagccatggatatggctcagttaggaaagtgctgcgtgagcacgaagacctggtatcactccccagtgtgtgtctacagcctccaacatgtacacacacacatcacacagacagtgtgagaagcaatcattttcctcttgaatggggtgtccccagctgacctcccctcaacaacaccaccctagcactcccctgaacagaaagctttgtgaggaaagagactgcaaagtggttcctggcatgaaaaggctgctcaataaacacctgctcagtgagaatgtgacatcttataactttgtgacaggatttcctcaaggtcttctctcttggacaacctctgggggcacaggattaccagcaactggctgaaacacaacatttatatgtgtcttgggagttagtctgaccaaaaaagacagtccaaaatgaataaatcagatacataaaacatcacagactttgaccttgtgcttttcaagactgacttgatttataaagccttaattacaaaaagacctgagtctgaggcctggggatgtggctcagttagtagagcgattggctagcacatccagtccccagcaccacatggacctggctgcggaggtacacacctgtgatcccagcattccctgtaatctcagcactgggaggtgcacacaggagaatcagaagctcggggtttacctgagatacatagttggacaccatcctgggctactgagaccctgtcttaaaaacaaaacaaaaaacaaaaaacagcaccttcatcacacagcaggtctgtgctctgaacctcactctaacaatgaaggtgggaatattaccccaaggaggaggctggcagtgccttctgcacacagcaggcctgtagcaaaggctgttcccgagcatacagctagtgattgacctctgcacagctctgctccctgtctgtccatgccaatgctgatccttacaaggtcaagttttctctcaagtatagacatcctagaccacacaggtcagcttgcccaatttggtgctgatgtgaaaacatgcgccctgggaaggaatccaggaggaaagagctgcacttcacaccagaatactagtctattcacatgggaaagaaagggaggaaatgaacaggggggaatcatattgctgaactatctccatggtgttcagggatgcaaagagaataattatgaaaataataaacaattgaattccagctctcctaccctccaaggtcaccagggggcacgcagagccgcacaggcctgtgcagagatgctcccacaggtgacagcctgacctggtctgaaggctacaatgggcaggcagagccaagaaggcctggatccactctggccaccagctgctgcttcctttccaggagatgctgtccaattgcagccctatagagccttgctttgaacctaatatctggagaccggcattgagaggcaaaccacaaatctttaagtgccaattatccagactctgaacaaagggatttgataatacactggctatttttaatctccaaaacttccaatctcttatgtaaatgggttagggttaagactatttacatgagtaacctcaaagataatgttcacacaccggtcctgagtgatgcactgtggcatgcctttgcttcagtagcaaagctttctggaatgtctgctctaatttacaggaattccagatagtaatcgaggtaactgctaaatgttctgacccccaggccttcaggaggaggccttagggaagacagagaatgaaaagcactaggggcagggagaggaagaggaagaagaggaacagggaaggaggagggaagggaagagggaggagtctaaagcgatgcaaagctctcagttttcatttcctctaccgctcagggattcaacttgagaccagttatgagaagggccaagattttgcaagtgtcttgataactctagagaagtgctggagacagacagtgtcagggagggaggctgcacacatggtgttgtagcacatccgactaacaacgcctatgtgttattagctaatgtcccagagcataacagcaagcacctggggtagtgagggaggggtatgagagttcatggtaaattcctaacacagcagtgtttctgtactgtctctacagtgacaaagcatactcatttgtcattcaactggagacaataaataaaatacggaaccttttcaacatttaaagtgtatcattcagggaatacccacatacaatgttaaccttttaaaatctggctttcatgaacagaaaggcctttcccgacttagtcttagaagtcatagaaggagcattgcacgcttgcatgtaccctactggtccaagcagtcacaagcttccccaggcaaaacagaaatggacttcgtaatctcaagagtaggaatgtggtaaagtcccaatactgtgtatggaatattcactgtggcttcctcaagcctggcacttcctaattccttgaagatagctgactctcttgtaaccctgaagacgagggctctcacacagtgggtgttcaaaaaacagtttagaaagggcatcatgaattctcttgtcagaggaaaggaacgatgtgaccactaacttgaattttatatacaagatgttcaaagatttgtagtaagaaagtgcttgcaagggtctctgcctaagtacctttcagaccaattggaccagttcttaaatctgtaaaaataggaaagcaagcactgttcagtagtgagaactctatgacctgagatgagggtgagagaaaaacatagatttaaaccctgactctactacttatgctctgcatcttacactgctgaagaactagctcctcaattccttttgttctctctttctttctttctttctttctttctttctttctttctttccttctttctttctttcttccttccttccttccttccttccttctttccttccttccttttttcctttcttcttcaatacagggtttctctgtttagtccttgctgtcctagaactcacgttgtagacaggctgacctcgaactcagagatctgcctgcctctgcctctgcctcccaagtgctgggattcaaggcttgtgccatcaccatcaggctccagctcctcatttttaaaacagtagcaaacaacactacctggctcatacacctgggagaattcaatgtatcagtccctgtaaaaggcaagactagagctgggcacacactggggtgcccaatcaacacacgctgcactcgaatcattgccacttaaaagtcttcagaccattcattccccggcaggcagtaagctcttggtaaaccacggctcttactcactgtctgcattttgtccagcctccatctgcctctctctcacctacttccaccaaatagtgaaggagctgctgacaaaatgcacaatgtgacaaatcaaacattatgaacttcctcattgtcaaaaaaaaaaaagagtgaaaagctcctgataatgagattgatgactaattcatatgccattgtatagccttcatccaacagctggtggaagtagaagcagacacccacagctaaacactgaactgaactgaaatccagttgcagagaaggatgagtgaagagcaaaggggtccataccaggctggtgaaacccacagcaactgctgacctgaataagggagaactcttggtccccagaaggataggtgggaaacgagcataggactgatccagacccccctgaatgtggtgtcagtgaggagaccttggaaatctatggggggcccttgtagtgcatcagtacttatccctagcataggaatggactttgggagcccatcccacatggagggatactccctgagcctagacacannnnnnnnnnnnnnnnnnnnnnnnnnnnnnnnnnnnnnnnnnnnnnnnnnnnnnnnnnnnnnnnnnnnnnnnnnnnnnnnnnnnnnnnnnnnnnnnnnnnnnnnnnnnnnnnnnnnnnnnnnnnnnnnnnnnnnnnnnnnnnnnnnnnnnnnnnnnnnnnnnnnnnnnnnnnnnnnnnnnnnnnnnnnnnnnnnnnnnnnnnnnnnnnnnnnnnnnnnnnnnnnnnnnnnnnnnnnnnnnnnnnnnnnnnnnnnnnnnnnnngataaatacatttgggggtaaagtcaggggctagggaaggggttccattgttaagatacttgccatgcaaacataagaacctgagctcagatccacagtacccgaagaaaatgctagagtggatcaggcctgtaatcttggtgttcataaggaggaaccaggaagaccctgaagctcctggccagctccaggtcttgacaaatcatgttctcatttaaacaataaagacccaggaagaccctgaagctcctggccagctccaggtcttgacaaatgggaaacagatttaaacaataaagtggatgggatggcaggatggctcattggctaaaggaacttgccaccaagcaagaaagaactgacacctccacatagtgcagtggcacacacacacacacacacacgcacacacaggcacacacacacacacacacacacacacacacacacacgcacacacaggcacacacaggcacgcacaggcacacacaggcacacacaggcacgcacaggcacacacaggcacacacacacacacacacgcacacacaggcacacacaggcacacacacacacacacacacacacacacacacacacaccccaaataaaatgtacaaacaaccaggtgaaaagcaatagacaaacagatacatagatgtgtgaacacaccaaacacccatgagcacacatatattctcatgtatatgaatgtatacatataaatatgagggagagaaagagtgagggaggtggaaggctagggtgagagagggagaatgtgtagtgaaattatactgtggggaaaagccacactgggattcttcttgttgttgttttgctttcttttaggaaggaaaaaacaaaaaacaaaacaaacaaacaaacaaaaaaaacaaccctaacctgacagtgagccagactgtgattttggttgtgtgaacagggctatcgcctgtcttattcaatgccacatttctgattgtggcttcagcactcagcactcagagagtacttcagaataatttgttgaatgagttgctttcattcacatgaaatcaatggccgggaaaggatctctcttaatattttagcctaagtaagtacttcaactttgaagctggaggtaatcgtattttaatctataataatcttgtttttccattatgaaaatgttcccccactttgggaagtgagcttactttttcacttcactgatgaagataatcaaaatacagcagaaaacactgaagaggggagaaatggggaaggaaggtctttataaaggaaagcaggacccacaaaaaataacggggatgaggagataggctttgtaacaagttcaatccttgtaatgccagaactagagagacagaaacaggcaggggctctctggccagcaagcttagaccactgggctatcctgcagtgaaatcctatatcaaagagaggtaagcagcacttaaggaacaatacccaagtctatgccctggcttacacacacatgcaatgtacattcacatgaaatgggaaaacagtaatcatgtatggtcttcttgcaactgacacccacaacttaattcaaactggccttttcttagggatggtgccagagtgagacccacgcacacaataaagcctaactatacaatagtacctcctccatgagaaaggacagcactaaaacaaatgctttccgatggtcccctaaggagggcagatacccaccaggggtaacttctttatgctttagctcatgctatcttactcggatgtgcttgagacctgcactcccacaaatgcttcacccactccagtcattagcagtgagatgtggggatctcctccctgctaataaccactctgggcatctggccttgctagctggtgtggtttcaacctggccttgggtactgatgacaacgactaagcttcccacatcagacaagcacatgccactcaagactggatgctgtagtcttcagctgaacaccagctttggggactactcgcctaacttgcctctgctggagccatcttggtctgtcaagtatgttctggtccttgccattgtcaggaggacaaaaactgatggtttcttaaacagctgtctgagagggatggtggggagggcacatgtgtgcctaggctcctccctcctccctctcaccccaccagtgcaaacagccaggctgcctgaacttgttccatccagctgactccactggcctcttcctggaagcatttctgcagctctcagaagccctgcagaggcacttgtccagtgccttaaacttcacaacttgatcttgaggtgggaacctcatatcctacacatcccattactcatgtcaattcacatgttaaaagtagagggccaacaggtctcagggatctattccgaggagaaggccaagacagaaggggtcccagcgctgagagggggaagtagacatgagttcccatccctaaccaagatactatctccaattgaggaccacttgcaaaggaaaaattagtcttctcaaatggactctcactgggtatacaaaccacaaagggaggccccaagcccagtagtagattcgaacacaaaatgaactcaatggtatttttgggagatttgtatctcatattgatttgttcaaacattttttttttttgcctacatatctttcacttgtatattatggtttccaattttgaatttttatgctctctctctctctctctctctctctctctctctctctctctctctgtgtgtgtgtgtgcgtgtgtgtgtgtgtctgtgtctgtgtgcgcgcgcgtgcgtatttctcatgctgtttgttttgctttcttcttttttaatttgcctgtttgttttctaaagagagaagggaaaagtgtggagttggaagtgtggagaagtgggaagaatctggcagaagatgtgggaaaggaaacagtgaacagaatatattgtatgaaaaaatatgctaacttcaattaatggggaaaaaaagcagagggccgagacagccacttctttttaatgttaagagatccaaagtgacatatgagaataaacacaaacatacacactagcctaggatgaaacaaaacaaaacaaaaaccttccttttttagccccaaagccttatgggactcatgatttataaacaacagcaacctaatctaaatctatccataaaatgtactgagagccttactctttccagatttgggaaaatgataatctttacatttatattttatgggactaagatgaaaaagaagtgcacatgcatcagcctatgttctcagcaaccagctggacagatggtcaagaatatcattagttaagaaagcttccattcattaccagagagtccctgggcaggctggggtggggtgcaagaatgtcccagaatgtgttatttgaagaatgtgttcgtgtctaagacatgagtccccgtggtggatgtgggggagtaggaacagacagcctgttgtgatccaacagcagccaagagttcctcaacactggtgcgtccaccagacacttccggctcccattccacccacttggttgacagtactaactaatggtgaagaagaaaaccaggaggaggtcccagtaactatcatgatccctccattctaggcacaattccacccaaacagaaatctatcatagacggaagagaaattgctgtcttgttggcttcccttctcagctcataaagattgtgagacgagaaacagacagcaaatgaaggggtggcgagtactgagtcaatccacaagaggacccataccaggtcacacccacctttccagctcagctcctcattcatacccaccagaagggactctgacagaagggtgagttcccctgccctagtcatctttcctccccctcagctccccacaccctgccctgagcacctactgggtatgagatgttctgtcagacacccacagggttacaggagaagtgagaaagtggagacactcagctcagctcgtgactttagagaggagtttgtgagtgaagatcaatcgacattcacagcttctgcacaaatcagtcttcaaaatgatccaagcattgcacctcactatcagtgcccggaattggagaggtctatggaagaaatcagagatgccttgaggatagatgagagagcagaatcaaccaagaggcaggtacagagactggagcaggaaatcagagaaaagagggacagggactgtgatggagggctccttcatcctctctggttcccaccgctgcctcccttctctcagccaactacctctgggggtatattatccctagccacttccttttgctccctggttcctacatctcttttcccccatgtgcttcttctgtcatgatgtcccgcagaagcagctggggccaaatgatcatgcacgtgctgaacctcccgaaaccataagccacagcaaaccttccctccctcaagttgcttttctcgggtgtctgtcacagtgatggaaaatgtaactaatccattaactttattaaagaatttagaaaagtacatacacacaacaagttaacaaaatatcagcctgtgctcctaataccaaaatctagattttagcaaatcactaatcaattaaccaagtgttaagataaacatatatgcttcatatattttaaaacatgctataaaaatgacctattagtctttctagaacaattcccccccttttttcccttccaacctaaggttgtgaaagtcaaacaagacattatggtggctgaaagctctgccttctatctgcttcataatatgaaaataataacatactcaatattttatgtcttcaaaatgaaagtatatggctattataaattaacagtagaaacaaaacttccttgtctgtttgcaacatcaggatgaggcatgaatacaacaatgaggaaagtgggaccctgtggtgacataaggatgcctcccctgtcctggtatcctgtggcatggtgtcatgtgcttttaatcccaacagtcaggaggcagaggcaggcggatctcttgagttctaagtcatcctggtctacatagtaagtcccaggacagccagggctaaaagtaagagtctgaaaaatgatgatgatgatgatgatgatgatgatgatgatgatgatgtttgttataattcactttttccattctgtagatagagttctggaatccaacagaactgaattcagcttccacccctcataaatcctcgcactacaggaagtcataaacagccaggctcccgtttgcttattctgaagcagtgttataagactatcttacagttgccatgggattgaatatagggataaatgatgaaagaaagaaactttccagggggcaacaacagaagcaagctggtgacatctttcatcaaagcgcccccagcccttctgagcaaagcagagttgaaaacaaggtcgagcctttctgcttccagagcttctggaagtgaatcgcttgtgacagcctttcttagacgtcagatctctcccttccatcctctttcctgcacttcccaagagggactgagaacacaaggaatgccaaggatgagaaagcacaacacaggcaacccgggactgaggggtggagatcagatctgagggaaaagaatactgtcacccacattcatgccaatcattcccaactttatcaaactactaagcacgagcattcagactcctacattagtttggacatggggacaaacaggattctttcagtcattatcatttttttatgacaccttcacaccccctgcacagtcccaggggtaatccaaaagtaacagggctcaagattgtttgatgtaacaccagctacatcctggtaaccagagaccactctggactctatcagggccccacctccctgaggacaaatgagcagaagaccctacgtgccatccagcctgcctctacctgccctagtaatctgtgccttctgaaaaaaatgtaagtgatggaaagctaactagaggagggaaagagggagtcagcaagagtggataagccaggcatgaaccagcacagagcacagactactgtggtcacagaatccagcactgtctctggtttccaccacccagatgaaaggaactcctttgtgggttggagggaagggacttccctaagataccagacacaccaaggtccatcctgatgactagagaggagactgatgggtggcctagagaccactgtcacaagagaggaagcagccacagaggaaggcctgggtggctgcttagctgtaaaccatgttcacagaagcatccaagcaactgagagggccccagtcacccagaaacagtaaccaggctttctgaggcacgggggtgagggtgtggggggggggcactgggaaggtagacatgccaggaatggagagctcagtgctctcgggttactgatacagacaccattgcctcagtctctgatatgaagggcatcctaaccatgctggtcttttaaagagccaactgtgggagactctcaatcatggacgaatggccttctgaaaggaggacggacacataagaagtaaacaacagctatgcacatttatgctttgcctcctttcctggagaaactggacactcaacaatcttcctcctctcaacaaagtttccccagattcctgaaaaacagtcaagtttcacctgtagatgagcaggcagctaatgtttcccaatggctcaatactagtgggtgtgaattctgcattagtccatgtggccagcacacaggcactcaaggccagagaggaagaggaggaagcaatacattgatattccgaattgttatgaaaatgtttcaggctaacctggaaaacattcgcaatcccaaaggtataaatccgatctaaaataagtttttacaaaaagcaagacagatgtttggatttgtttccaatgcattaaagaaaataacaacacgttactcccttgaacaaagaatttcacagtgtaaatggtagctaattgtgaggcaggaaaagagtgtttagtcacttacatttttgaagtaaaggttaatttgcggaaaatgagaagttaggacgtgtgtaatgaacccaacagtatacaatataaagaaccagaggcaacgactactcaaggattaaaacaggaggcaaagaagtaagagaagctaaagtacatttcattcaggctctttcctccatttagtcatgataggcagatatgcctctagtgatgagcatggtcacccacaggatgctactcaaactatagtcactagactcatgcccctagaacactaacaacgtttcacagaggctgtggggtccagcctgcattacataatgagaatgnnnnnnnnnnnnnnnnnnnnnnnnnnnnnnnncatgaaacactgatttttactaaaaccaacacatatctttatgttttttagctctcccatataaggcaaaccctcacatgatctctttatttgtttgtttatagaaggaaattctgaactgagcactcttctatggggagagcggcattcatcattttaattattaagcatagccaaatatttatacatccttaaaccccaaatatatgagcagttagatgagtattttttttcctttttgccttactataaagggctatgtttcaattcatggatacaatgtgattatataatatatccctttcactgatatattgtaacatagtccttcctagtaatatttcatgacacttttatttgaatatctgtgactttatcaatgccactttgtatcttctaaacatattttagacttcatttgcctacacccctccacaaacacagagaactgtttctgaagaaacataggacagaagaaaacagcctctttctcatgagattaaacacaccaagaaaacaaaactatatatatacacaggaacttgaacacaaatgtaaacaaatatgcatgatccactccttaacaccatcaatcaaatccccactggctagctgtcttctcaccaaatagtaaactatgatggctggagagatggttccttggggtaatgtccttgctttgcaagtgtgaggacccaagtttgaatccccagcacccacataaaaagctctgtaatactaagttcgggaggcagacccaagcagaacccgaatgcaatggttaactgaaataatgagctccagtttccctgagagacattgtctcgaaaaataaagtgggttgaagacttcctgacgttatctctggcctccacatataccttcaagactcaatacactcgcccacacatatgcataacacacacacacagagagagagagagagagagagagagagagagagggagggagggagagaaatagacccaaacatcctcaaattacagacttgttatttaccaatactatatgtttactgcctggcaagttgattccaagttcaactggtaagtgtaaatttccctggatgtgtcacagtgatgcactgaagaagggagagtctctggcaccaggcaagctgcacaagaaaagacaggtcagtggtggctggatttgagaatcccagtagtcaacagtgaagtcttactaatgtgaggtcacattaagagacagatgcaggcccatgtccaccacctcggaggccaggatgactgcaccatcctcctggtcctcacaggcgaggccttttcccatcaaaggctctggtggacggcactgcagatttttatgctgctttcttttacatcaggtttattttccccatgttaaaccccgtcaagtttactgctcagaaacccatcttagaaaaggaccctcctcactttgaagaccccttttaagaaatgtcaaggggcagtaaacatgaaatagtatccatagcaccaccaatgacaacaaaagcagagcaaagctaatcagtcattcccataaaaccacaccctgtagtctctcagtagcaacccaatgagatttgtgaggggaggtaggcagtggaggactaggcagctgaaagacagacttcctgctgcgatgtccctcctgtgcctctgtcctagtcaaaagggctttgggggaaaagaatgttttatggttcctctgctgttcaggacccgaacagcaagtttatcatgcctggggccctgtgtgggatggatttgctcatcttcaagtttgcaaagtgaaactcgaccttctactgttcagactcagtctttaaatcaaaccacacagacaggcccagcataagggcaccttcctcctcggctggtagcttcctggtgaacagtgaggtgatcaaggagacaaacacacacagtgtaagatttggggccccaacctcaagggctggggcctcaggagctaaagtttgaagtgaagcaggcagatttacccccaaagccgccaaagcggccaacagatgttctctaggacagaatgacacgattcaaagatttaagaaaaggagatgaaaaagaaaggaaactggatatgcacttgtcacaactgggtacaaatataccctaaagttgtagattagaatgactccatctaactagtaataactggaagcagctaggctgcctgctctgaggaggcttgtttgctactactctaaagaacactttacctgttaatacactatttaactgttgattaatttaatttcataacaacaacaaatccaagagtgagaggggtagaaagtatccctcctcctaggctgaggatatagctgcattgctagcctgctttcccaacatgcatgaagccccgggtttgatccccagcactgacagggcagggtcaactttagctatagagtgtgtttgaggctagcctgggatataaaaattctgtctgataaagaaatgagaaggcctccaaagccacagagaaaccctgtcttgaataaacaaaaaagaagagagagagaaggaagggaaggagggaggaagagagggagggagggannnnnnnnnnnnnnnnnnnnnnnnnnnnnnnnnnnnnnnnnnnnaagaggaaggtagaaagggaagagggaggggaggaggagggggaggagggaagagagagaggggagggaagggagggaaggatggttactcccattttttggagaaactatggctcagacttgctaggtgatctgcagaaacaagcagggaactgaaaatacaagtgaggtcttgcctcttccctcacatctcagctcatctacaattctctcagatgggaaagaaaattgactctcagcttatgcctgtaactgtggcatggtggatgcccagcttccggataaatgaacacgcactccctgacactcttcggtgaaccttttcctttactgccctgggccacagtgcgttgggcctgagagtgtcctgtggaatcttaagaagtcagaaaaacagggccttgtggggaaagctggctcccagggtgaatgcaaacgtcatctgccttgccccacacagctccagaacttggaccagtaggaaccccacggtgcctccctgctgcacaggccactccccctgctctttacttccatttctctcagttttaccagaagattctacctagtcttccctgcttttatctaggccaagcgatgttttgccaatgacagactctggggattttgttggtttagaatcaacttgttctcagcttctcccaggttgttaacaggcatttggtccaagccacacctcctctaggcctgagctctcccacacaccagctcctgctggcttcaaagaagagtggtggcaaaagaaacacccagattaaaagacaaaccctgctgaagtggaactccctcttggtgggaaccaggtgcagccattgctaaccccctccctaagaagggtcaaatctccctagttctggtcatttctgagagattggtttgggtgaattatctgttgttctcgtttttttttgtttgtttgttttatgaccttaagaattgaactcagggcctcacaaatgctaggcaagtgctctatcatcaagctataaccctattgctcctttttactttcttgttctgtttttctgaagacggggtctctctatacagtcctggatgtcctggaaatcactgtgtagaccaggctggccttgaactcacagagatccatctgtctctgccccctgagtggtagaattaaacacatgtgtcacaatgccaggctttctttttacttttactagacaggatctcattagattgtctgggctggcttcagacttagtcttcagctgaggtaggccttgaacttgctttccttccacctcagccttctgaatagcaattatttcaggcctgttccacctggcccagcttttgatcatctcagatgtgttccaatctactgcgaatgtgatgacaggctcctgcaaggcccaacttgaggaggaaactttatcaaattctacagagcaatttagacaagcaaaaggaaaaagacccctcaactattggctccttagtgatatgtgccaccttaaagccaaggccttgacattacatgatagtcctcagatgcttagtttgtaaaaaacgctcaaatgatttccataatttgctgccatgtgagcagcacaccaagtgtgcttgcagacacaagccaggagtgtgtgccacattgggctctcattcctttgaagagcagactactcattacaatgttctttatttcatcatacatcttcactacaacaacagccattttcacttttatttctccatcaaaatgttcaattttccatatctgagtttcagtctcaaactccccatactcttcttcctctccatctcatttctaatattccactttccagctgaaggtactccaaagcctgacctatagtcagcatttacttccagacctcctgaatgaaaaagactcactaaaaaagaaggcagcggaagacatgttagtgactatttttggatcacataagcaaaactctatttttccagagaaaaggaatcctttaacctagtttgaagatggaaaaaaaaagagttagatatactgtgttcaaagttttgtttattctctagcaaagatgggggaggatgcatagttccaatatttaaaacgtgatcccattttcctccacaattaaccatgttaggcgaatggtaaccttaaagcaatgcaaacaaatacagccataaagtttaacaaagggtctcggctcatgttgctgttgttgcctggagatgacttgaaaatgtttcctttaatgcccctctaaaggatatggggttgtgttgtgttgtgttgtatgtctgctccaggaccacagtgaatctgttagctggttgggaacagaactcagccaattcaggaattgctcacatgccagcaccgcatagggaaacaggaaggcctaagtggctgttgtctaacctgttttgtgttgtctttgcttacttcttcccaagctcttagcaaacaggtaatgggagttaaatacttactgtgcagtcactgggctggcccaagtgcaacagccagtaacttcaaaggacacactagcttggatgtctttcacaggggacagagcacaggccccagggcttattataaaactggaggaggcagtgacctcattgcctggcccctggtcacctgagccacactacattctctctctctctctctctctctctctctctctctctctctctccctccattgtacattgtgtgtccttataccaccttcttggaaaggtcatggtccccaggctcctccaccaaagcaggaaaacacagaactagagaccaagaatcctgaacatcctgttcatttcttcccttgcatctacatgaaagcatgcatgaagtacttctttattttaatttacaacacggtttcacaacaaacaagatagaatccatgttacctagaaatgcccaaaggcatatagctatagccgaaacactgaaattccagttgaattgaaaagtgacattaaaaaaataataataataaaaaaaaaagcaagacactgacttaactactgagctacagtaactttacagaaggaagcctgggccggcatctatggtcaattttccaacccgctgtggcactttcttgtctcagattcagcatgaggcttctctcatctatgaagctgctcttgaatgtcctacacaagtgtttgttttccactatatccctctggtctgcacacccagaaagcagtagtagctccagctatgcatccaatgctgctcaagtctgggagcaactgaactcccttggcagattcccactctccacactcccttcagcctcatgagtgtgctgtgcaaaggacctttggtgcctccctgaactccactttgatacactcgtttgcttggactcttaactctcagcagttcatctccagtatctgtccccttcatctccctttgtctcagagcagttaaagaacgcactggtctaagggtcagaatccttctgcgcttgtacgtgctctaggccactgatctcaccctccactgagaacagaggaccaggaaattacagccactttttatgggagaaattttttttaaaaaagcaagtactttgtgacaaacacaaggtgtgtgggtgatcgaggcctaaagcaccagagtttacaggctctggcagacatcatgaagcctctccactactctctgggtagagacaattctgtcaacaagagacagaactaaagaggagggtggggaggggactaacatgtaggaaaggatttcccaagaaattattttcattttgactcttgttcccattgattcactgaggaagagaaatgcaaacatgaagtagctctttctgctaacctgcaccctgtattaatggtgtctgtgtcagggctggccggatggcacagtggttaagatcccttgctgttcttccagaggattccagctaagttccaacacccatgctgtgtagcttgctaccacctgaaatttcatctccaggggacctaatgctcctgatgtacatgcatcacacacacacacacagacacacacacacacacacacacacacacacacacacacacacacacacattttttaaagtttcatgtttataggaagccacaattaaatgtaaggaatcagtcctggtgttccgttacacagaagcatcaatacaaatgataacttaaggatattccaagaaagtcggaagtgatggctgttttgtttgtttgtttgtttgtttaatgcccctgaagtaaaagtttcaacagtaaaatgaaggaaaaaatgaagctacacacagaaaatccaagaaaagtctaatccaacagtaaaataaatcccccatattgttgcaaaagactgtcaactaaaacgctttgttataacaacaaaatcatgtatcgcacagaacagattccaatgtcctaaagtaacagaagtgggctatcaaatctttcaaagtacactgcacaaatgactagtgtttagaaacacttctcttataaaacatgggccatgtgtcttcacaaactggtggtgtgatgtcccaggcagcggtgtgtattgctactgggtggggcacagcatccaccccttgaatgtctcataactttgtccttcctttctattgaagttgaatgaattcacctgacccactggccaaccaagcttgcttaaatctaaaaattaaagtagaaagtttagaatgactgaaagttattgaagtcagtgaagacaactaccagtttcacaagggagctaaaatcctctcaaaatgtgtagtctcaaatccaacacagaaacgaatgctataatctacgttgtcacagttaggttgcagttctgaagcaggtaaaacgggggtcaagaggtgactttcaggactgggttctagctcagtgggttaagtactagcctgacctgagtctaatttacagagcccacatgaaaagcccagagtgggggctggagagatggctcagaggttaagagcactgactgctcttccagaggtcctgagttcaattcccagcaactacatggtggctcacaaccatccatcatgagatctgttgccctcttctggtgtgcagatatacatgaaagcagaatgttgtatacataataaataaataaaatcttaaaaagaaaaacaaatttaaaaaaagaaaaaagaaaaaagcccagagcagctatgtcccagtgttcatgaggcagaggcaggggacagagaacggaggacaggggatggggtctctagagcttgctagccagcctaagctgccaggtgagatctaagtcgatgaaagactctctttttctgtaattataatcaggggtccacacttctcttgagcatgcttccattccgtatcactgtacatacacaccccagacacagtagcccatatttagtcaaagaaaatacgttatggttgtttaggatatatttctaataactattctcatcatgatgctagatacttaattccttacaatcatttggagtttcaacctgccaatggtggcacatgcctttaattccagtactcaagagacaaagacaggcagatctttctgagtcctaggccagtctggtctacaaagcaagtttcaggacagccagggctacacagagaaacctgtcttgaaaacaaaacaaacacctggagtttcctatgacatttaggctatgcaaagctttagctctctgtaaattattaccagattcagttggaagtggtgaggcaggtggaactacaggactttgaggccagcctggtctacaaagtgagttccaggacagccaggattacatcgtcttgaatgaatgaatgaatgaatgaatgaacgaacgaacaaacgaacagacagactgactggtaaataaataaataaataaataaataaataaataaattgttgcaagattcttctctgagtatgttggaacagcacagtgtaaatgaaagtgtttgcccatgtcttgatcatgctgagtttagacttttttctaattatttaggcagataactacattctaaagtgatacaagtatttaaatatatatatatatagtcaccatgtcattttttgtcaactgttgccttcactacttagttgattccttctaaagcatagaatcatgccatctggggaaaaggaacccaaaaatatttgcttaatcataactaacattgtaatcaggacaaaaaaaaagaaacaccattattccctactgaaggaaaatgcaattataattagccttctgaaaatgagtaacaatcaagcataaatacttgttaataggttcacacataagcacatgaaaacaaaattgacccggtcaaagaaagaacacctttctctccttcctaggcctcagtcccactgtctacccccactcccacttctccagggggaaacccaccttctgcagcatggtgaatctacctcagcatcctagggggtacagtcctagtcttctctgaccctttttcttgtatcccgtaggtatttctctaaccaaaatctatcttcctttccatgactgctgcccacggcctgcctcacatctgccccagctgccagtttctctctatcccatgctcctagatctgcctccaggagcacagccctgacctggtccctcccacaggtttgtaggttgcactttgtgcaacctacaaaccaagtatcccctggttctcaccaacaaagcccacttccagccgcgtcatctggacttctttaggtgtcagcttatggctcccgggactttagtgttcgtggtgcttaaaaagatgctaagtatcctaagaactttaggttgggattttaagctagaggtcttgctgtgcccatttcatggcatctagtcagtaaatgtaaatttactaaagctaaagtcttcattctatctttcagcgctcagtcccttcataggagaacctgcatgaattactaatcaacagactaaggaaccaacagctccatgactgtcagacccaccagcttgtcttttagaataatacacctagaaacatcagtaacaaactcaaggaaaaatagcaatgctaagaacactctcatcaattagtcactgagaaatgatgtggaatgcaaagtgaatgttgggccttcaaagtttaggctctgttatcaacttccacctacagcagtccagcaaagacacagatgtgcgccaagaaggaatgtgttagcgagtgagactaatctacacacttctaaaagaaactaattcttctcaaactgttatcataggtaagcctcagtttgcctaataacaattataaaatgagtggaagcccgcctgacaagcagccacatgtcctaatcccatcgtaatgtggctggtgtggcctggactgagcaaaggggattcccagctcagccagcgttctttaattagcttcacaaccttgggcaaatcaccccaccttcagcagtctccccttcttcacaagggtaataagaacctttgactctgattgtttttaaagatttttatcccgttctgaggtttgacttgtgacgtatgagtgttagatataagtgtttttctaacacacaggatagactgagggaaactcaaatgcattgtgctaagtgaaaaagccagataagtggtgtgtgattgtattcacaaggcaaacgaagagatgggtggagggaggtcaggggtcaataggggtttgaggtatgggggttgtatgtctgcagtagggtagcataaaaatgtccttttgggccggacagtggtagcgcatgcctttagtcccagcacttgggaggcagatgcaggcagatctctgtgagttcaagacaagcctggtctacaagagctagttccaggacaggctccaaagctacacagagaaaccctgtctcaaaaaaccaaaaaaaaaaaaaaaaaaaaaatgtcctttagggatgcagtgatggaacagttccatatgaggcggttacatttgtcaaagttcccagagcagcacaccaaaaaaagagtaacattatttcttacaaactaaattatttaagtcactgaaaaactattttttcccattctgtataatttttaaagatctcaacacgagtacagtgtcccaagagagttacactgctctccagtatttgctataaccattttgttgcaagaatgatgagccgatcaatgtgtcccattaggtggctgtttgttttttgtggctattgtctttaacctttccgcatagccctctttctcagtatgttacacctaatgatgaagaacggaaagaaacaaaagtggggaaactgctgggtcacccagacctgtgtggctttcatgcagtgactgcttttgtacccctaaagtatggggtactagacatgaccgacagccgtgccacagcagtcagcagcagcgtgtaatgtttaatgagcgttcagtgtgttcttagtgtgtctgtatagtcctattgagtgctaggaaaaatcctactaagtgctaagaaaagaagctcatttagttctcagaataggcctccagtgggtaatactgttatcccatttgtcagttgaaacaatcaaatgactagcagatggcagagtcagaattaaaacctagacagtctagccctttaccacaaagatactatactgaaaatcttcatttttaaaagggggggagcggtatatgactgtggtagaggacaacctcacatattgttcctgggacaccatccaccgttttttgaagtctgagtctcattttttttggagctcacacagtagggatctacttccccagctcagggattaccaacactggccactatgcctggccttcaaaagggctcatggggaatcaaactcaggtcttcaggcttgcaaagcaagaactttactgactgagccacctctacagccctagaaaagctttatcgaactaacttactctccttcttggaaagactatggcaactagtacacaaaccatgaattctcatcctgccttctttcagaggacagactgaagcccttctctaatagtgacaagccagcttctctgccacaacctggtgacatcctggagaggtctacagtggggaccttccaagagcccttccaagaagatttttctctgccaggcacagtctcatacccaggcctccttccctactcccagaccgctgaagaaagcttcctgaatgcccttcaacaccaggcagatgaagacttgaacttctgttagataccagtttcttctctggttactctggtgttgcatgcaagtctgggcctctggatacaagcatgtcctaaagcacatccattcctattctggaaatgactagctctctcctaaggtaagacaagccaataaattcctataacccagggggaatgctcagtaaaggggcaagagggcaggcggaaggaaacacaaacaaaaaccgggtaggccattagacagcacttgtaaagtgttgggccttgcagttccaaggcagtagaaggcagatgactggagagaagggggctcagctctctcatgccttgtttagtctgcttatctcaagtctaaactaatcatcttgatggttgtttgtggccagaatagggtttagtggcctttcagatgggcagagaggcgcagcccagttcttactagactccccccaaggatcccacattcctctttagcaagcatgtctactgggaaagcaaaagagaattcatagttttattgatttctgcaactcagactgaaaaggctacgaacagcaggaaggtgtcacctctgctgtttattgctacacctaactgagagatcagttttggaatagaaacttaatagaaaaaaaaaaaaaatcagagagttaattgcctgcctggtgggaaagatggcaggtctggctgaattaaggtccttcatggacaccaaaccctagtgactgacagttactacatcacctactgcaaaggaactttttacagaatctccaaattaaaccaactatctgactaccagaatcaaggacacaaatctcacctggaagggggagggggtggggctgggaactagatgataggccaccttgactttctccaccccctccctctcatccctaaagtagagtcaaatgagctgagaagggagagaataagccaccttgactttctccaccccctccctctcatccctaaagtagagtcaaatgagctgagaagccaggcaaggcctgttaacccagaagcccgcctccaattaatgtgttattgctcctttaaaacctcctagaacggcctggctgctcctgatcccggaggctgaagcacagtaattgtcacttagccacttaactccccgcagccctgctcactcactccttgtggtctatctctcagccaattactgctgtcatttgcgtttcaatgtgtggaatcagaggccaggcccgggtatacagcacaagagaaacccccttgggggacaggaacctaccaagacccacaggctgacgggtgagacacaagcagcccgccagtgtgggaacagcaaaggggtctcctggaaggggaggtctactgagcaccagctgtgttccttttccgcctcttcagtggggcaacccaagaaaagaaaacctcccttaagatgccacatcagttacaaataatggtggcaacatttaaaaagctgtagtgtgattgcagacaggaggcaagatgtgctgaggattagtcaagacaagcaagagccacagatgtcaaggcaggggagtctctattccagccacagggctcttcaagcaattggggaggggagagagggggttgggggaaggataggcataggcaggcccttatccctttctggagctgccctaaagtcccagggaacttgggagcctcctcagctagccctacatgaacacttctagaacctgtttttgtgatctcttgtattttaggtcgttgctatgtgcggcatagtacaggtgtgatcccctcactgggctgaccaaggctgaagaatcaggagtcacaggccagcctgggattcacagagactatctcaaagaatccctaccctctccatcgagaaaagattccttaaagcatagtttcaatcgaatcagaaagtcccactgtccccccccccaaaaaaaagagccaaagagccagaccatggtggcacatacctttactcccaggtggatatctgtgagtttgaggccagcctggtctacaaaggtacacagagaaaccctgtcttgaaaaatcaaaaaaacaaaacaaaaaaaccctaaaaaaaaaaaaaaaatgtgaatccatgtgtctagagtcaggattggcaaagtcactcctggtgactgagtggatcagatcctggtttttttagggtggttccctctgcctccccaataaaagcaaaattccccgcactgtattatggcttttattccaaaaggtttaaaccactcctgtcagcccaggtagcttcctagctgaagttaattaacttagcccattaattggaacgcacttgctctacctaagggagacacacagagcctgaccactggaggtagacaaggaagctgaggcgcaggcagggtctttgggagcagagctaacacagtacgagtaagagtactgttgagccaacagggagatagaggaccagccagaggggtggggagccaactaactccagtttgtatctccactgagtagcaaggaggccataaacagtaagcttcctcagacattccattctccacaactcggcaaccaccagaggagggcctaagccggaagagacctgttctagctggatctatctccgcctgtctctaggttgaaaataaaactctgaacttctctgccaatgagctctgccaggcccgatgacgtcctggtgcgtcagttctatttgcaggcaaggtccctgtgccccaggtgaggaggagtctgggaagaggactcggggaaggtgggccttctgtgcacagacgagatttgagaaagagccgctggggtgccagtaattgtctacgtcagcaagggctgtgccatggagagtgggcccagagagagctaattgctatcctcgggctatgtgctcctcattgaataccagagcgggaaatctgatctctgcaaagcaaaggaaaatcaccagtgaattaaagcaaggcagcagtctgcccacaccggccacagcctcccatttgtccggtcttgttattaagaaaatctataaatctggagctactagatttcttgctcatttctgtcatcacattggtgacaattgagcatggagactgactccccatataaaaaggtggtcccagggtgaacttcataaggaccccatgagtctaactttctcctcctttccgctctgagtttgcaaggtattttttattattattattattattattattattattattattccagctgaacaatcatgcgaaccgctcctgccttgctttctccctcttcctccgtctgtttctcagctcattaatagctgggtctctgggtcgtgaagtgtgcaataagctgctctttttcttttgtctcacggccaagagactctggagaggcaagttcctctcctctggccctccccactgtgagtgacagcccagtggagctttggcagcctgccaccgatggccaagaacatcgagctgtccaatcagcagcacggatccccgcccactgagaacaagggagcaagcagcctttcttcagcttggctgctgccacccaaggtcctcagagctgcctccacctgtggtcctgcccgtttctcaaaggacttcacagagtacctgcccttgggttcatccttctcgccctggctccgtcagattcaatttgacacaccgggaagagccttagtccctcccactttaccactccagcattttctgctctcccagtcttgacagaggaaaaaaaaaaaaatcaatggctctgtcatttgtgggttatccatggtgttagaaagagcctatcttggacttcagtgcctctctgggcccccacagataccccacagatacacaggagacgatggcttctatctaaagagaccctctgactgatgttccccaggctaggctcttaccccctcctcatcttccactccacctgcaagctttttgcattttatttcactcacatttctcaaatccagctcccagaatccagagatgagatcccagccccttagcccaagccttcctcctccatgtctcttacacaacaccaggagagagttaaggctcaagatctactctgtcactgttccaaacccctcagtgtggcatctgaaagtggttcccttccacagacaccatgctgactcctgcaccaatcccctgttccactgggaatcccccagcccctgctcagtctccatcatccccacagatcaggccctcctaccacttcacccagctaaacccatgagtttgctcaggcgctccccatctggactaggctacatgcttctcctggctcctataaccctgaaacacatttcagacattgcactgagttcacagggactgcgtccaatatctctgctgagtctcagaacccagtggcacaccatggacacctgttacaaacagtagattctcagcatttgggatattggatttggactttttggactttcagattactggtggatgccatctgtttcttaccacagtgcaatcaatcaatacctgagtctgaattagatccacttgggagttatctatttaaaggcagcagacttccagacaccaaagaccgagcctatgtaacgtattttgtctggcaacgtctttgctttggggtacttaacatgatgaagacaatgacagtgacaatgacgtcagccatgacaggaagtgggagatgattagacatccctttattctctgaggctgtggaactgcttaaaacagcccaggatgagtcacagaaagacagctcacttatcttgaaatcttaactaaccaaaatccagcctggatcctcagtcagccatgcttctgagaagacaagatatgtacctgaaagtacacacaccagagcttcagttgagaactcatggaggagttgcatagcctgccttcagagtactttttcttgctttaagtctcccttgagggactgaggagtcagctcagtggataaagaactgagtctgaggactagggatcgtatccccagcacctggataaaatgctggacaggcatgatagcccacctgtaatcccagcatgcaggaaataatgacaggatccctagaacaagctggatagttacactagtcaaattaatgagctctggcttcaactgggagaccctgccacaatatatgaagtagtcaacactaaccaatggagtgcacatacacatgtgcacagacctgaacacatacacatacacacgcctgcttccacacctgcacatacacacaattatgtgtctacacacatatacctacatacatataaacatgcagacacatatatatgcacacatacagacactgaaagcaaaatccatatccccttcattagtgtaatctcattccccaagaacaaaaatagcagaggagcagagtagaaattggctcccagggaccaccatgaacttgggagaagtattaaccacaagtaaaaggggacagagacaaactttaagggactacaaagacagcatgctgagacatttcacatttagaacaacgagttctacacagaatctcagacccaaatgacagcagcacatgctgttacaggtagaatgctttctccacagcgatgacagagataatgagagaggcgatgcttctgcagtactctgcttacaaaggacatctagagtagtttgttcctatcaaggaggcttcatgaaatcgtgtttatcattaccaaagcagcctgtatttatactgacatgacagaggcactggagacatgagccattactttgcttcacctgaggtttggagagtcaccattccacaggccttgcccatcaagagtatgcagcttaaaggaaagcaatactcatgggaatgcatttgggtaggcattttattttaatgcatgaagaaaccaaaacctaccaaatacaagatgagctcctgatccatgaaaaatgcaaagggaccatggggataagctgatctgatgaaagagcaagagatgaaagtatttcaaggcagttcaaattgggaaacaattttctgttaatagaagagtctcatgtagcccaggctagcctgaaacttgcttcatagccaaagataaccttgaactttggcctccatctcacaagtccttgaaaatgcaggcatgcatcgttgtgcctgcttttatgaggcgctgtggactgtacccaggaccttgcaaatgctaggtcagcactccctctgtccactgcactacatctccagaccttctctggtagctctgtcttcctcattctcttcaccccacccccttatctcaggtcctttgtgtacagaagcagcttggaagagggaaatgatgaaaaccagactttctttacttcatgagagtcacacagccgccatttccccatgcaaccaaagaaaacacaaggaagagaccacaagggacacctggttattgttcagcaaaggtgggatggaagacgttaacagactcttgaatttacgaaaggagaaactcccaaacaggatatttcaagaaggaatgaaatacagtgtcggcagggagagagagagagagagagagagagagagagagagagagagagagagagagagagtcctttaaatgatatggagagagaagtggagagaatgaagggaagaagctgaagttaggtgtttactgacccttcctacaaaactggaaacttcatggctgtgtctttacatccacttttcttcctggtgacaagatggaagtaagcatgtgtcataaggtggggaatacacatgactgcaatgttttcaacactgtatctccagtggtgcttctgaactggctgtcactaactggtgttgctttttgttaccctgcctgcattaagaaaatggtctagaaaaataacttatttaaagtaacaaacttccaaatcttccacactttattttcccctcaacaacaaagtataagactaaaagaaatgaaaatatgttctgtatttgttcaacactgtgagcttgatcctgagagttcttaaaactctgattttcaaattgaggtaaattctattttgcacatataaagtgtgccaatttacactgagataatattttgatgaagaatatttatggtgcactcaaaacatctgcagatgtgccaaggtttagagctagagaaatctgagttggaatcctttgttatatataagctgccagccttgctctggtcactcaacttctctggacactgatctcttgatctgttgaacagagaactgagtttgttgtcaggaagatttaatgagagatcagatgccaaacggtcagtagtttggcatgtggccattaagcatcagtcagtcagtacatacattgagcatccaccatgtgccaggctttatctgaggcatgtacctgcaggcgactcaacaacagaaaagagaaccaagatcccttccttctctgctcccttcataagccatccccaggagctaacaaacccaccaccaaaaccaagatttcagtgtagcctgaaacaagggttgtatcttcaagtgagctctagcctatggcccagaggtctgagcacaaacaccccgtggctactggttcttaccaggctattcacctgagaacaggaaagtagaggtctggagagacccagcctgggtgcagacagtcacagaactcaggagataggcattgctgtcccttttggctcttaaaatgagaaaggcgatttatggggggcaggatatgaagtgtgtgtgtgggggggtaattgtggctctactcagaggaagctctcaaatgaactgctccattgtttctgaactctctgagtcattttcacttttcctccccattccttcccagctctccctttggtgtcttgtgtgttcatgtgggacacaagagagtctttgtaagactctactgtgcaataaagccagatatcagggcaagaataaatgtgcaaaacagagggacagtaaaattgataggatttgtgtattttctatactttcttatctacaacatttcacttaatagaactggcaaacttgcaacaacaacaaatgtacatgtttataaaactaactatatgcaagagctccatgtgcttgatccacatgcaatacacacacaactcaaaacagaaaacatttctgcaaagccaaaacacaattctgagtccttttttcttgttactaacacaaccccagccacctcatttcacaagtaagaaacttcaattcttttcattaggtgaggcagtaagggattatgggaagccagaggcactgtgaacccaatatacttggtcttagatctcaaccctgttcacttctcactatctaccatcaagaaaggttttaaatgtcaccagacctcattagcctcatctgaaaaccaggtttttgcaaagaactaagtaaaaaggacacaaggagaggctcctaaaacagctgtcttccaaacaccccttccccaatattcaccctcaaaacctttaattccctccattttcaccgttgctctccttgcccatagtcctccaactggtcttcagcctcttgttggcaacctttctacactacttagggtctgctattagaagcatctctccaagcttagaaatttgatgacggtactctctgcctcagctcttgctatggtaatcatactcaaaacaagtctatattcagaacaaaatccacatgcccccagtccatccgtccaggttcattcttccttgcccctatgtgaccatggtccccagtgcccctaagcatcgttcctgggacacaccatcttctctgttgcactgactcgtactttcccccaatgggtgagaccatcacactacccctcccatctgcagagacccttgtcccctttaaggctagctccagttccatttcctctataaaagctgattacaaggggttaaacttgtgcactggtaatggctttctgtattaactacagagttatgtgtacaacgtcacttaactatgggttcctgtaaaatcaaaattaattcacattctttcttattacaagaggaaaataccagagcacagatagaatcaaatcaaagcaaacccaaatctagcaatgcaaatagcttagtttccaacatctggaactcactcaggatcagctgggttccaaagcactcaggtgtcctatctctgcagctctggcagccacaacacatgtagcttgtgtcgtgcgctcagtttggctcctactctacacttgctgctatgcttggcggttctcccacagtcctggtatctcccccatgctacaacttcatggcaactgcatcttcaccagtggcctcccctggcctctcacaatgccaggcctcagttgttctccatgacctcttcaatcatgcagcttttatgcagcccaaaccagcatcatatgggatacctacagattatcaagttctgctgacagcttgagatgcagccctgacccctctggagcacagtttctatgtgttgatcctaaggaaatacttcagaagatttcaactcaataattctggtctcttattaatcacagcttatttctgagcctcagcaaaccagcatccattgttctagtaaagcaaaaggtttcacttccatagtcttaatacaaatatcgtacaactgaccagcccagagggagtctgcttccctctgaaactacttcacaatccaggcctccattgtctgcatttctcaaaacactcccatctttcaatctcccacaaaacagcccattaacctacaaacacacaatggcttttccagcccaaaattcaaaatatttccataatcctccctaaa

SEQ ID NO: 34 - DNA, 391790 bp, Cricetulus griseus
  modified_base (704)..(794): a, c, t, g, unknown or other
  modified_base (9078)..(9244): a, c, t, g, unknown or other
  modified_base (44693)..(44963): a, c, t, g, unknown or other
  modified_base (45342)..(45477): a, c, t, g, unknown or other
  modified_base (48698)..(50192): a, c, t, g, unknown or other
  modified_base (51138)..(51155): a, c, t, g, unknown or other
  modified_base (64010)..(64165): a, c, t, g, unknown or other
  modified_base (64567)..(64612): a, c, t, g, unknown or other
  modified_base (65959)..(66278): a, c, t, g, unknown or other
  modified_base (90948)..(91074): a, c, t, g, unknown or other
  modified_base (108207)..(108269): a, c, t, g, unknown or other
  modified_base (167041)..(167465): a, c, t, g, unknown or other
  modified_base (182712)..(183553): a, c, t, g, unknown or other
  modified_base (184965)..(184996): a, c, t, g, unknown or other
  modified_base (207113)..(207168): a, c, t, g, unknown or other
  modified_base (209614)..(209643): a, c, t, g, unknown or other
  modified_base (229668)..(229719): a, c, t, g, unknown or other
  modified_base (275283)..(275403): a, c, t, g, unknown or other
  modified_base (299067)..(299339): a, c, t, g, unknown or other
  modified_base (308102)..(308148): a, c, t, g, unknown or other
  modified_base (339612)..(339638): a, c, t, g, unknown or other
  modified_base (389339)..(389395): a, c, t, g, unknown or other
  modified_base (389699)..(391687): a, c, t, g, unknown or other
ctgcctgtttctgcctcctgagtgctgggattaaaagcatgtgccaccaacgcctggcctgttccacactttttaattggattgtttggtgttttggagactagcttcttgagttttttgtatatttttgaaatcagttctttgtttgattcggggttggtgaatatcttttcccagtctgtgggctgccattttgtcttgctgactgtgtcctttgccttacagaagcttctcagtttcaggaggtcccatttatcaattgttgatctcatgtctgtgttactggtgaaatgttcaggaagcagtctgctgtgccaattaattcaagggtattatttaccactttctcttctaataggttcagtgtggctggatttatgttgaggtctttgatccatttggacttaagttttgtgcatggtgccatcaccatgaatctatctgcagttttctacatgtcagcatccagttatgccagcaccatctgttgaagatgctttctttattccattgtataaatttagcttctttgtcaaaaatcaggtttttgtaggtgtatgggttagtatcagggttttcaactctattcctttggtctacctgtctaattttgtgccaataccaagctgttttcaggactatagctctataatagagcttaaagtcagggatggtgatgcctctggaagttcctttattgtacnnnnnnnnnnnnnnnnnnnnnnnnnnnnnnnnnnnnnnnnnnnnnnnnnnnnnnnnnnnnnnnnnnnnnnnnnnnnnnnnnnnnnnnnnnnacacgataacaagaatggagatatcataatagagggagacatttttggtttacagagacgtcaggcactagagaaatatctggagatctgcaaagatgacaccaactaacaatctcagcaacagaggctacattaaatgccctcccctgaataatgagatggatgactgattcatatgccacctgatagccctcatcctgcagctcgtggaagtagaagtagacaccaacaactaatcactgaattgaactggaatccagttgcagagaaggatgagcaatgagcaaaggtgtccagaccaggctggtgaaacccacagaaatagctgacctgaacaacggggagctcttggtaccagagtgatagatgggaaactagcatgggactgatccagaccctaggaacgcgggtatcagtgaggacaccttggaaatctatggggcctcctctggtaaatcattacttatccctagcataggtgattttgggagcccatccctcatggagggttactccctgagccaagacacatggggtgggcctaggacgtatcttaaaggatatgacagactctgataacttcctatggaaggcctcaccatccctggggagcagaaagggtatgtgataggtaaggttttagttgctgggggggggagctgcactgttgctcgaactcactgagctcctgtcttctccttgccttgtattcatctctagtgctggggcttaggtgtgggataccaagtgctgagatcacctttgtgtgagctctgcttctcttttagactgaatcaatttcacgtagtcaagggtggccttgaactgacagattcgtctgcctctgcctcccgagagctgggattaaaagtgtgagccaacaatgcccggcacaatcttgtttctaattcaaaataaaaataaaaataaaaataaaagctttactaaaatattgtgttcttttggtattaacttcatacttcttgtacttaactgccacttttttctgtatcatttagttttgtactaatcttgtactgtttggttcctcatggctttgaggacctcaggcaatattttgtaaccttgtcatataatatgctatgtcatcacagtttatattaggtacatactgccatgataaaattgtctactgatgatttttcacaatttaatccataattaattgacccatgactatattgcttttaatgcagatattctccttgtgtctttcatgctggctttgttgcatgaaccctgaagcatttgttatagcactttcaaggaatgtttataatcttttcagtttaactttatatttttttgttttatgtgtatgaatgtttgtcttcacatgtgtgtgttctttgcatacatgcatgatgctcctatatgtcagaagacagcagttcccttgaaacaagttaaatagaattgtgagccattgactataggttctgggaagtgaattctaatcatctgtaagaacagaaagttctcttaacttttgagacaactttctagtcacacacttcatttttaaagataaagtggcaataataacaaaccatgagtcaaatacgaagaacaaacataatatttatgagctccgcagagagtataacacatagtaaagaccttagattttccttaatatcgtcacctctacatctacttcagatgcatgtattccaagggatgaatgtttatgggtgcaggataatattcttcaagcagtaagtgtgtatgactaatatttcacaaatgtgtctagacagaaaatttgcaaagttttcttgaatgtagggaatgaatgagttagtgtttggtttagaccactatgcatgaatatgatacatatagtctatctttaatccaaagcaaacctggtgctggacttgtgtgtaatcttttttatttaaattccttaattattactcatatttacatatctgttcccccattcccttgccttcccatcctcccaagttcccaaccaacccctcccaacccatcctccaactccttaccagggataatgagaccctccaccttcaaaatctatcatatcatttgggggaaggccgaggccctctttgctgtctctgggctgcaatagtatctctccatagggaatgagctcccaaagtccatttgtgctgtcttggcctcctccctggcacccacattcagaaggcttggtttggtccaatgctctttccccagctttatgactagggtctccatgctctcactaggtcagatcaactgtttctgggagtttctgcagccctgtcttggctcctttgctcatccctcctccctttccacaactggattccaggagtatggttcagtgcttatctgtgggtgcctgtttctactttgaacagctactgtatgaaggttctaggaatggtaaccaaggtataccatcaatctcattataggggagggacatcaatggcatcttcaccaccactgcttggatttttagttggggtcatctgtgtggatcacttaacatttcccctatgccagatctctctaaaaacctgaactgtttccctctatcaaagcatctcttttcttgccctcctctattcctcccctgtctcagtcttgttctccctcctccctttcttcccttcccaccctcttcctctccaaccccccatgttcccactttgttcaggggtttttgtccccctctcctttgagggactatgcaatcttcttggggtactccttgttttctagttcctctggcactgtggattgtggactggtaatcctttcctttatgtctaaaaatcatttatgagtgagtacataccatgtttatctttttgtgactcagttacctcactcaggatggtttcttttttaagaagcatggagttaaggagattcttaggtatgtgtatgtgcttgcaaggcagccactttgtaagaaccaattgttgaattcattgaagtctctagaccatctaccaagaagctatttagaattttcttttaggtgaagttgacaatgagaggaatcaattcaagaagccagttggagtcatttcattgtacaacaaaacactgctcttgcccagcttagtcattatcaaccaaccaagcagccttacctttggggtcagatgcacaggtttgaggcaggagcaagggttcttgggaaattctctgttgctatattttgcttttcagatgctatatagaggtagtcaccacatcagctgatgaaaccagatgggttggggctcatgtaataatatacttcagataattaaaacattttaacaatctattttcagaaagatagtgagtaaatggcaacatatctcaaaaaaataaagtcaagtagtatccactattcatttgaattgattggaaactttgaatatatataaattcagtaatgacacaatttattgaaaacatttttctagtttaatttcaataaaatgtttgccatattttctgcattctgctggctttagatctcctgactcttgtctccatttgaagattgagaagtatttcacatcttttcacttgttgaaaagaacaaatagcaattggggctgcttttgtgatggatgaatgaacttcatctccctgaatccctgtatcacttgagtccatttgttttctgcagcgtgcttggctgccacttccatgcccccaaacttgcttcagcaccctcctctgtgtttgccttctctcaactgattgctgaaaaggaagcagctggtatttccaattctaaccatggctgttcagtgctaacctcaggttcagactacagatctgttgctggttgctcttttctctttttctggaaaatggcattgcaactcttgctgctatttttaaactgttgaaagctcaatagtattttcttattcctatgagaaagtagtagataaaataattaattgacattaacacaatgagcatttatctcattgggtttacaaaatattcttaattaaattaatatttatttcaaatgacatctaacaagtctttagtgccaaacaataacatagcagacagacataagaaacctcagagagaaattgtggtgtgtgtataatttgctatgtggtttcagggttattaaatctagttttgagagaatttactcaccatgttaagaattctggaaaataaagttagtaacatttgtgtaatatggatatagttcaccaatccaaagcttgttaagtaagtacaaagatttcagtctggatccctagaaaaatatgtaaaatgccaagcgggcttggtggttgctgttattatagccttaggaagcgatgataggaagtcatcagaatgaattgcttcacaagacaaccacaatggagagcactgtgtgtgatcagtgaataaggcaaagaacattgataatttgtggcatggaacttggatctctaaatggaagaagacatcatgtctcatacctgtgtactcacacctgcataagcatgaataaatatactcacataaaacacacatgaaaactggacaaagtaagaaatcatgaatgttattatttttcatcatccaacaaaaaattgctgttatcacttccatatacatgcttactctgaaccagaatttctgattcctcatcagtgggatttatgcattttcccaaagaatcagtccaatggcatagttgtatacaatcatagttaggcaaatccatgttctttcctttaaacctttgtcctataacatttccttagttagcaacataattccagttcatttgattatcagggaactagagtcttgttttagttctctaaattgatcactgaccaagtggatcacaaatgcagaaattgattttcttactgttctgaagactggaagtctaaaatcaaggtaccagcaaggttgattttttttaaagcctttatccttgactagtaaatgattcctttttacatagctgctaatcaatgtatgcatccgtagcacttatattatatctaatgatgatactgtgtttcttgggagtcctgatacattcaatatactgtttagagaaagaggaaaagtgcccatctgaggatgagattgttttcatgtacatgtgggtttctgtgtttctgtgtgtatgcccctgtgtctatgactttgtgaatatggtgtgtgtgtgtgtgtgtgtgtgtgtgtgtgtgtgtgtttgaagtggaggattttgggacttgagagaacaacttacatgaaatttacaatttttcttttgatttcttcattttcttcttattcatggttgtttctattctttccatctactttgcttccctcttttcattttttccaactctcctttctttcctttcaagcacagtatatgctatttagaatatgtagcaatgatgctgacagcagaatgaaattatatcatgtaaaaattaaaggcaagataactgcatgtggtatagggcatgaggtcattttcgaattaatatcacatttaattgttttaaaatttagaatgctgactaaccaagtgtgaaagctagagtgagacattctttaaagataatgtctttaactttggtattttatacaaacccgattaattggttatagcatgataaaacattaaattctcttgaaatagaatcaagaggtcttagtaaagtgctttcagaattttcaatacacaaaaccagcaattttgaaaagaattgacatgcttttgtgttttttttctttctagacagatgcatagactttaggtgggtggaatccagtgctgctatgaacacaagttacaaccatatagcacaaaatttaaactaaaaattttatatgttattgagcaatctgtacatagaattagcaatgcaatgagagtatggaaatatctaccgactttctgtcaaaattggctccaaacatacaaacaaacaacaagatatcaattatgaacatggcattgggaggtaatttcctatagtatgctaaaacaataaaaactctaggatatttatcattcagagataatttgttgtatgatgtgaagaaaaatcagataaaacaatgcttgtgaaaaaaatttatctcactgtgaagaaaaatcatatcacattatttattttgagtgatgaaaacagaaacattttggcatttagtttgtttttttgatggaatcagaggaaacaacactatggaaaaggatcagctgactgcagaattatgattcttggagaatgaaccaaagacaggggatcatggcttctgtgtgaaaccacagatcctgacaggacaaacaaaaggggggaggtgcgttattggaggactagtcacataggcatgcagcatccacaatactgacatcagctattcaaaatcaatggccatccttggaggagagcaagtcaatgttcataacatacactgttaggataaggtcatttcaatgtagtactacacatctagcttcaggcccttctcaggtagaatagagcttggattactgagtcagtggtccccagagaggatgatttctaccctaaagagaacattgaccagaggcatttttgagggtgttgatgcagtttattgttgcattaatgataatgaagagtgtctttttaattcttccaggggatagtcactatgcatggatgtgtgtgctgggggtgggttcgaatgttctttactgtttattaacaaaaactttagtctactagtcctattttattaggattctgtaaatatttgttttaattttagttaagtgaatgtgtgtgggtttctacatttgagagaaggtgcccacataagccagaaaaattatggaaattctataaatcattttgatgattattttgtgtttattttgattttaccaactgaaataaattagttggttctccaagttttttgctaataaattattaattccataccaggtccaactggggacattttggtcacattatgatcatattggcatggtatttataaaacaaacaagcaaacaacaacaacaaaaacaaaaacaaaaacaaaaaaccagaaaatacggtgtctttagaagtagatatgagaagactaatgctgttgtcaactttggttgtcaactttgatggatctggaaggtctgtaaagggatttgctgaatggatttactgaagggggaatccccatcatggtgcatggcacttttggaagttatcaacacaggaggagattcaaaagaagtggtattagctctacctgtcctcactttcagtaatgagcacaacatgctgtggatgcactgttgctgccatcctttgcttatttcacaacccagattcttccagtggggactgagtaccagtatctctctagcaatctcacaagctctcagcaccaaactgtgattgctgaggtgtctaggtttatgaactgagcagcttccaaatctcagccattccaccatgaagatgtaagaccccccagaagttcaggcctccagtatcttttcccaggacttcggccaccccaatcaccatgaggaggcagaaacttgatgcaaacaacaagaggctttaatgaaaggtggatatttgtacaaatgggctctctcagcatgcaggctagagagcagccccgtcccccaggcacaggcctttttaaaggcaaaaaccacaagtttagggagggtcctcaactctctgtccattgaataagtgaccagagtcatgggttcctaggaggccctttgtcttgaggggaggcctgggaatcagatagactcctaaccccaccagttgtaacacctgaagacctcaggatgtgctaactaatgatagctatctctttgtttcatagggacccttaattgttaattattgacacattgtcaggtggtgcaatctgtttccttcatgagccccttggggaggatggccatctgggaattcttggtacccagttatcttatggccttgtaagggagtaattgctggtggctggtaaattccaggcactaagtcatagtagtagactttgtcagtttctgggctatatttctttgctaatttttaagtctttcaaagaaagctcctgttgggctacacagcatctattatgaaggccaatctactaagtaccatattaataacgtatattgtgtatatgcaatatatgttatattaaatattatatattaatatatattatacattatgtatacattaacttagatatattcatcccattccttctcttcctctagacaaccctgacaaannnnnnnnnnnnnnnnnnnnnnnnnnnnnnnnnnnnnnnnnnnnnnnnnnnnnnnnnnnnnnnnnnnnnnnnnnnnnnnnnnnnnnnnnnnnnnnnnnnnnnnnnnnnnnnnnnnnnnnnnnnnnnnnnnnnnnnnnnnnnnnnnnnnnnnnnnnnnnnnnnnnnnntctcagtcagaatggcaatcccatccatttcttaaagccattcctgtttgcattagcctgtgttacatgcactgtttatgacttaaccatattttcttaggctttacctttgcagaatatagtcggtctagctgtccctccctttgaggccttctatagtttaaaacctcagtatcttctctcacagctggccagagaagctcaaaaactgtttcatgtaaacaactaacaactgattacagacggcattgatatacaaaaatcctgctttacttgctccttatttgaaagaatgttgagccatgcatttacaacactatctatagttcccaagggcagtgttattttcctagtagtaactggtggttagatcacctcattagtatctgtccttccttgtctgattgcctcaggaccctctaatgtttctcaggatcttttgtgtccctgttgtcacaaacaatcaggaagaaaacatgcagacacagaaggcaacatgcacaatctctactaaagacagggagtcattttatctattttatgcaaagaattaaaaattatacttgaaatgaaggaaccagcttcccttttggtagccataacggccgaacacgttatgcttctatgaccttgccctagacactagaaagtcagattcctgtctcgtgacaaggaaccaatcgggagttagctggtggcgctatgctttatggctctgggtgtgctttacggacaagcacacagcaaggacatagagagcatagcaaccaccctgggagggccaatgggccataacaaccagttgaccaatcaacacagggtaagccctccaagcctggaggcacaacaatcgtgagcctgtgcgtactcctagacactccccttatgctgccctataaagatctgtacgtagcagcttcgaactgtcttttctggccatccgccatggtgggtgggtgaaagacccgagctaacatggggttagcttgttaaattacaataaagcctcgtgcagtttgcagcaagctctcgaatccacctggtgattagggtggcctcaatcttgggctaagattctggaagcctcagctttccgagggtcttacagaaacactagttttggtcatagtgcttttcagctggaagaactagacagcaagttagaggtcaagatcacaatgatcagtatacaaactggaaaatacacaaaatgatggatgcctaagtattttttataataaaggactgcttgagaaatgcaaaatcattgttaaagaagaacatacagagtattcagctatactatatacaacatattaatatttcacacaagattaaggaattagtttcattatagagtgaatgtattttgcaaaatcttaccattaacaaacaatgaatgtgggaatactccctaatttacctctctctgtttttcatccttaatgatggcatttctgccatcaccttctatgaaatcaaaatttgtgtaatctacctattagtgagaccaaatagtattggtctttccatgattggattattaaataaacataatggttgacaggtccatctctcttcaatatttcattgtatatgtgtaacacatttttgtacccacagctcacttgatggttacatgatttgttcctgatttgaatctatttgtgttatctaagtataggggctgataggaattagcatactggttatttatttggctgtctgtcaaggaatgggactgctgaatcaaacaataaacctatgttacatttactaaagaacttccaaactgtagtaatttaaatttttaatagtgggtaagcactatttttcccatatctttatcagaacccctcctcttttgttgtagtgtttggtaataataattgttattggctgtatatgatgaatggttagggtatagtgggaaattaccaatacggagtcaggtagaaatataagggtatttaatagggaaaagccttacttacagagcgacctagccagctggtggatcagcagcctgtaccgcaagtaccaaagagaaaccgaaaccgaaaacgcagtcacactacgtcactctgaccacgccctcacaagcctggtcaggcacacctgtagccagcccctaagaaggcgtggctacagcttcccctacattagggttatgatgacattattttattctctagtgatgttgaccaattttttctagtaccattagagaccagtgacttgtctacagaaatttacagttttctgtgtaccaaattgaaaattattttaatgtatgtgtctgtggtgtgtatgagatagaggagggggggtagggagagagggagggagggaaagattgagagagagagcgagagagagacagaacacacctatgaaggtcagaaaaatttagaaagtactgttctgctatttcggctctagggatcaattttgagttctagtcttgacaataagcctccttagcagctgttctatcatatcaaacactgttacccccattttaaatcaagtaattgaatattttgctagtgagttttttggagtttcttatttaagcctttattaactctcgtctaatgtatggacttaagagtatttacatctattctgtgtgctttcttcacattttgttctttcctttgcctcttgtgccttgttgagttttttaaaacatcacccagcatgccagggtggcacaagttgttaatcctagagaggcagaggcaggcagatatttgagtttgaggtcagcctggtctacagagtgagttctgtgacatcaaagtctacacagaaaaaccctgaagtaatgccatgtaatgccttttagtttgaacacaggttttgttttgttttaaggataaattttgtattgtgaccatggctcaagagcacgctttcagtagacccaggtttgatcctcagcacccacatagcagctcacaatcacctatgtttccagtttcagggactatttgtccctttctggcctctgaggggactagatatgcacatagtaaactatttgtagcaaaactatacacttataattaaacctatttttaaatggctttcattgattgagtttttgtgttttcatataaattttaagatattttaagataaaggagagcttcattactattttgatagttggtattctattttctgttagaatgtctttcactttttcaaaagaaatattccaaagtattatttttgtagctactggagctagcaatctctctttattcttttttcagaccatgcttggttcatataaaagctattaattaatgtatcctacaatttttaacaattgttttattaattctaatcattttaattctaatcattctaatcatttctaatcatgaagtctttagagtgttttagctgaaaaatacaaccatctacaaccactgaaacacttgcttcttttcccatcacttattttttgcttattgatcttgcctattggctctgtctagggtgaaactggcattcttgtagggccccagactttagactgctttcagctcccttcattcatttattttatggtagaagttgacttacaatataaaggctttacagaaccaattgtcttcagtgcttgtacattgcaagtctgctaaatttcatcaaatgcttttctgcctctgacaaatgttcttatgttcttttttcatgtttgctgtgatgtatcatatatatttgtttgcacataagccattatctttgtatccttgaggtgaattccactctgtcttacacaaaatgtttttaatgcaattcagaattctgttagtgttttgatgaagactgttatgagattggccagtagcttactgctttggataccaagcccaattttgttacagcagcaatgctgacttcacacattgtgcacaaaatagttccttcaacttcacctttttttaggaacaatttaagatagaatatggtttttcttttgtctctttacaaatacttagtaaatttcagtactgaatctatgggcatttctttgatgagaagtgttttaagaagatgcactcttgctaattgttctttttcaaagattctttttaattatttacctgtgtatgtatgtatgtatgtatgtatgtatgtatgtatgtatgtgtggaatagtgccttctgcactcagaagactgcactgagcctccaagaagtacagttataggtgcttgtggtagtttcacaggaccttaggtcctcctcaagagaagcaatgattcttaactatgggcctttcaagccctatttttggtttatatttttggtttcttcatgatttgttgatattgaaggcatatgcacacacacgcatgtgtgtgtgtgcatgtgtgtgtgtttgtgtgtgtgtgtgcgtgtgtgtgtgtaacattttcacttctatattatgaagaaggttgatgtttgatttccatagtaatttcatagatccaactatgatgccagctgtaacatctttgttttatcttgtattttatttgctgaagccactttttctattataatccattggttggacaattttttcttagctattattttgtatcacttataaacctcaatctaattaatttttatgtttatttttcatcacatctgtttttgggtttgatatgttgttcttttttgtttctcttaaaattaatgacagataatatagttgagtttatcctttgttttccttggtgggtatttttctctttttacttcatatttcatggtttcataatactattttcaagtttgcttccacatactctcaggatacttatgtctttataacttaacagaatcagaaagaaatgaaaagacatataaaacagcaagcatatgaatacaactttctaaactttaattcattccttgccagacttaaaatgtttgatgccgcactaatttctctattgtcttaatatatgagatagattaatttacactgaatttttgcaatgattatatcatttctataattttatcttttaatcttcatattagagataggagtggtttatgtcttacatttacatgattagaacattccaaaattctcttcacttattcttactcaagagtgttacatcttgtggcatttcattttcttattaatgcttagatctttctgtttgaggaatttctgttaggcacagggaaattactcagcaggaatcacacttgctgcacaggcatgaagacccaagctcagattgccagcattgataacacattatagaagttactgtgtgtgtaatcccattgctgggaccatacagagacaggaggataactgggacttgctgaacattagtctagctctcacatgaacattagtatcaaaagaataagggagaaaacgatagagtagggcatcaaaagtcatcctctgctctttatccccatacagctctctctctctttctctctctctctccctctctctctctctctcacacacacacacacacacacacacacacatacacacacatgtacacatgaatatacacacacaatctcattcagtattcataggatcaattttgtgagagacattctattaccttttgttggattggacatacttttactctttcagttttaaaggatagttttacgagtagtatattctcatctgtaattgtttcctttactgcagaaacctcatgtcagtctcttaagaggatctttattgagcttgaataattacagaattaattgtgattactcacagaactgcctgtaattacttaagtgtacagacatagtgcacatgaattatgttaaaaaatatcattcatatacatgatgtaggttattcgaatacaatgtgtggtttctttcgttttttttcaattgcttaacacgttttattccctaacatggtttccaaatcagacaagctgtaaacaacaagactttctgagtaaaataatttggaatgcaaaggtaacaaagaatttagggatgcagttctcagaggctacattttcttaagatgccaacagagcaggagataacagacttactttcagatttttgcagaaacactcatgaaagtcagtaaaacatgtgatgcatgtacttatggcttattacagggaaacagaatggtttcaatacccagagggagagagaactgcttgactacagcctattctatgtgtacactgactctccaggtgtccattcttcatagagtaacaggcttcaataatcatttcactgactgttatgaactgcagatgtttatattatacttagaatctagaacctttaatgctccactatccaggcaggtttaaatgtccatctagttgccctcagaattccttcctgcaagaagtcaaggcagtgcattgtggcttaaactactcaccctaagctacattttaatgtgatctgagacctgctgacaagttgtcctgctatatgacattgtggttacttaggcatcactgacaagatgtcaggaccaatgtgcaatactcttttaggacaattactgactatggaagtctagaaatgagactgtggactcttccaactggcttgatgtagcttgcttagcacaggttaccaagggatcattttgaaatttgtattttatattatatatgttggctctaggcaatgcgttcttaaataatttgctgaagaaaataacatttgaagattcagcttcaaattgaaaattctgttttacaggctttttagaaattcttgatttcaaacataaatgatgttgtactttcaaaataaagaggaaatataaaatatgcagattaacataacatgcatttttaaaatgaagtattattagttaagcaatcatcaatatagtcttatgtatagtcattacctaaaaaaataacacgcatcacattggctttcattttctttaaagcctacctgtattcattcaccacatacttatttcatattactatgagttaaatatcaaatccactttctagaaaacttaacataaggacacctgcaattcaggatagaactttaatttatttttatttacataatgtttcttgctttctttgtggcaatatgttattcaaaactctaatcaccctctttagcgtcaacactcagtcatttttacctggcaaaatggttctgttttatactggtccttttgttgttaatccttccaggagtttcatatttcctctttgaatacagtctcaactctctgtgtttcaacactgctgtaccctttactaagaagtatgaaaaggccagaaccccaggtatgtgaagaactgcatcagatatccttgcaacttatgtttaaaacatttttttttcaatccaggacagaggatttgggcaaaataatctctttagtcacttgttattcttgtcaccattttatcagcatctgtcaggcagggacacttgctgtctctgttttgtatgacatgaccatcctggctatctagcaaggatgaagcaattcccacaagcgagtacttatcattgatggcaatgccagcactgagacctgctcatcaacctttcatgaattacaaatatttcaagttggattcattttatttttaatgttttccaaatgcctggagatctcagcatggtagaaatctccttggagtaacagttgcttttcttgcagttctgagcaatcaaatgtgtgcagtcactcttgagtgattgtgctaaccgtgatatttttgagaaaatgctagagttatatggcttagtggctattcaaccacagattaccatatgtatttaccttttaaaatatcagacttttcatgttaaagcccaatggagtcataaatattttaaagtttgtttcccaaatttgttatctaatctcatcataacatgaaaaaaaatgtgtttgatagagtttgtttccttgaagttctcttatctctaagtaataatgaacagttttaattgcaagtaggcccaggggacatctaaagattaactacattgtcaatttaattgacctcttgagagttttcttcagagcatgtgttggtataaacctggtcaaaatcagaagaggaagagacatggggatagtggaaaatgggctgatttgcatcaggaaactcaggtttcattttccttctgtagtatttactcatgcatatatttaaaacacagatgaagtgtgagagagataactgtggctaagaggacttactgttctcccagaggactgggcttaattcccagcacatcattcacaaatattttaactaaattcccaggtgatcttctggcctttatgggcatcagacaaacatatggtacacagacacatatgaagataataataaaataataataataataataataatagtaataataatttcaaggaacgaaagttcatttcctgtctttaaccatcatagtttaaacaaacaatatcagaatatgtatatggcaatatatccagtaaaatgtcatgtaactacaagaacttattactgtgaattataaagcatttctcaacacactaggagaggcacagaagccaagtgaaacccacatataaattttacttgtttctttttttctttccattttttttatttgagttagaaagaaacaaaattgttttacatgtcaatcccagttccctctccctctcctcctcccctcccccacaactaagatcctaccataccatttctgctccccagagatggtgaggccctccatagggggccttcagagtctgttatatcctttgggatagggtctaggcccaccctgtgtgtctaagctgagggagcatttctctatttggaatgggctcccaaagtgctttcctatgctagggataagtactgatatactacaagaggccccatagatttctgaggtctcctctctgactcccatgttcatggggtctggatcagtcccatgctggtttcccagctatcagtctgggaccaagagctctcccttgttcaggtcagctgtttctgtgggtttcaccagcctggtcttgacccctttgctcatcactcatccttctctgaaatttgattatagttcagttcagggtttagctgtgggagcctgattctacttccatcagctgctggatgaaggctctaggatggcatataagttagacatcaatctctttatcagcagagggcatttaaggtagcctttcctctgttgcttagattgttagttggtatcatctttgtagatctccagacagttccctagtacatgatttctctttaaacctataatgtctccctctattttggtatttcttatcttgctctcttctgttgttcccacagctcaaccttcctgcttcctcatatcctcctctaaaaatttcaaattgagaaaaatattttcaaacacatttccatctattggatatacaattatgcttaaatcttaagttttaagactgctactgtcatatgttcattcttactctagagaaactcattaactaacccattttgtgctcataatcagaacagttattcggtcaggatgactttgtcctcagattcaagggtatgccaggatgagaatgaattaatgatggtatcttgatcacctgtgatgggattgattaaatctagacctgtgatgcagatataggaagaaaaaagagggtgtgtgggtgaattggtaaatatagatagatagatagatagatagatagatagatagatagaagagagaaaggaaagaaagaaataaagaaagatgatgttatctcctgctggattcttgaaggaaaagattaaatctttaaattttggccaccaaataacttagtatgggagcaaaaataaactctgggccaaagatatagctcaatcaatagagtgggcattaagcatgtaaaaagccctagattagatccccagctctacatcaacaggaatttggtggtggaagcagaggtatcagaagtccaagattgtctacagattgttagagaatttgaaatcagccttcaatatatgagattctttctgaaaaattaaatataacaaaatactaaaacacttcaacatttacacttatgagagcttgattttctgtgctttgcaagcaaaatcatcctgtgctattattctgatgccttatgtaattatctgatatccttgggcctatggatattgaatgactgcttgtgagattttgaatgttccctgtgtcacaatgaccacagccattgtgatgatcactgtttcaatcactttcgatcctgagtttctaaaaatagaatattgttgacagtgtgaatagaacatgaatatttgacattacaaatgacatgcatcttcggctttttaattacagcttaatctagttcaacttcatttaatagatatattatggactgttatgtattcccttaaaaatatgttgaagatttaaattccaagtcccttggaatgtgaccttgtttgtacatgggggaggtggagagtaaccagccatgatttatgaagatgaaatcatgctggagttgtatgggcagtgcagtatgactagtgtactcataggaagaggcaatgaagacagactcacatcatttgacagattcatctatgccttaccaacaaaaatcaacagggagtcagaaagaaatacaagaagattaggattgcatcacacaatgtagtgctatttgtattatttggatattgtcccaatctgtattctgctgtggaggtctacgggcatcttcaattagtcagttttttttccttctaccttggaggcctctaaatggaattcctgttatacatctcagtggcaagtgcctttatttgcttgccatttcacagattttagaattatttttaaatgccccacttaatttctacatattaatatcacataatcacagttcaccactatgcaggaaactattgttttttaggaagggctgtattgtgaggaggcagtgtctctttcctgtatctcaactgagaacaactcacctgggactactacctgaggactgttctctgatcttccaagtctagggttaggtaggccatgcattgtgcctagaaaacttcattgacaccgaatatatctttcttaaactcaggaagtggtattcccctgcataaggctggaaccatcaacacagagtgtctattaatataactcactggacagaagccaacctcttagaatttggcagaacaatgctagcttttagttccttctttaatttccactgagattaattaactttgggtcattttataaaacccatgcttcctaggtaaataaaagaaaaatgattcagatatcctctaaccctttatagatttcttaggtttctcttcttataagggggctgaatagggtgaaggtttttcattcagaaattatttgggtcttgcttaatattttacaagttttgtataaagagatttgagttctttctcaatagtgtcaaggaacaatatgagataaagaagtgggtgactaaaaaatgatctgatccctgttttatacagtaacaagttttggaaacattatggggcattttcagatctcaaatgtaagactctttcttaaaggacataatgatattactcttataattgtttggattggattatggttctgggaaattgctgatctgtcatacttttacattacaatgaatttaatagtgaatattatattatatatgctcagaattgctaactagactagctgctttgggaaacatggagttcagtgaaagattatgcttcattaaatagacagttggatatctgacttcaactagtgatctacacacacacacacacacacacacacacacacacacacacaatgcatcaggctcacaaacctgtatttatacacacttataaatataaatgtattataaataaaaatcatcaacctctaaaatggcttcatcaggttctttaaattggttatttaagggacactagtccattcaagtattttgctctgccaggccctgcctatctctcctacgacttctgctttgataaaattcatgagattatcatcatgcacaaaactcaagtacaaatggatcaaagagatcaatataaatccatctaccctgaacctcatagaattgagtgtggggaatacgtttgaatgcataggcatgggagataacttcctaaatagaacaacagtagcatagactctgaaagtaacaattaataattgggacctcctgaaaccgagaagcttctgtaaagcaaagaacacaatcaacaagacaaaatggatccctacagaatgggaaaagatcttcaccaaccccagatctgacaaaaggctgttctctaaaatatacaaggaactcaagaaactagacctcaatctaccaaataatccaattaaaaatgggatacagatctaaatagagaattctcaacagaaaaaaatctcaaatggaagaaagacacttaaggaaatgctcaacatcctttgtcatcagggaaatgcaaatcaaaaccactctaagattctatcttacactggtcagtatggttaagataaaaaataccaatgacagcttaggctggagaggatgtggagaaagtggaacactcctcctttgctagtgggagtgcaaacttgtacatcattgtggaaatcagtacagcaatttctcagaaaattaaggatcaacctacctcaagaccactcaataccattgttgggcatatacacaaatgagaaacattcacaccactaggacatttgctcagctgtgttcatagcaacattatttgtagtagccagatgttggaaaagcctagatgcccctcaactgaagaatgactaaagaaaatgtggtatatttacacaatgaatactactcagtggtaaaaaacaatgacatcctaaacttggcaggcaaatggacagaactagaaaaaaaaaatcctaagtgagataacccaaaaccagaaagacaaatatagtatatacttatgagtgcataagtggattccagacaaagcaaaagttacacagcctacaatccatatgcccagagaagcttgaactctcttcctgaaatagaagcaggtacagaaatccataactaaccaatgggctaagaaccaggagtacaaatgaactgaggaaggagcaagaatttgaacaaaggagtcatgaccatgatgaggaaacccacagaattaggtaacatcagctagtgagagatcactaactcaggtctgaaagatggggaacctgcacaaaaccaaactaaactccattaatataggtgacaatactgtggctggaacaatatatgaggccaattgcagtgggtccaagatctaatgctaatgcacaaactgacttactggagcttattctatatggagagatacattgctcagcctagacacagggttgtgcaggtggagaggtgccattgtcctgtttcaactagataatgggaccgacttagtagacttcctagtggaggccttactctctccatggagcagttgggaggagggggcagtggagggagtgggacgagaacagagctgggtaactgggattggaatgtaaaaaatatatttaaaaagtcattggattacatccctgaagctagtctccaaggtatattccttatttttacaatctatcctctggaggctgctaccaaggttcagctattaaattactaaagtccagcaatgaaaccccttttggctcacctaattagcatgcccaattaaaattaaacacctcatcctaacatggtgtttcctattttacctccataaactgccaatggtctatgtgccatgtatgtcttctcacaatccagaggcactcctttgtctcactgatgtaggcagaccttctgtatgctataaatatgtgctgcttttattggctgatgaataaatttgttttagccaatggataggcaggattcagctagaggggatttctgcacaaagaggcagggaaaagaaagacaaaggagacactatgtagctactgggaaggtaggatgcctgggcattctctgttaagccaagcctaagcggagatacacagattaatagaaatgggttaataattaagagagggctagccaataagaagtctgagccataggctaaacagtttataattaatataagcctctgtgtgtttaaatgggactaaattgttaccataaatctttccgccaaaagccacctgagccccaccaccacgcgtgaactttaccctagctgcccgcccgagttaggcccaaatgaatacacagaaacttgtattaggtataatgttgtttggccaatgactaggattctcatctgtttgctcagtcctaactatcataaacttatatattttataagatttatcttattggatgctttattggcatccctcgttgctggtggatcacattgtgctgctggaggagcaaaagggacccttcctgtttctccttcgcttaaatatgagtctccttgctatgccacttcctgcttagatcaccattcctctattagatttcccagaatcctttttgactcctagtcccgtctaacttgctgtctcattggccaaaaagtattttatttaacaaccaataagataaacatacacagaaatacttcccccatcactaaatggctacaggcccgggcgtgacagaaactttcctcttcagtcccactgtaggacaaatgtcccatactgtgatggttgacataggactcagagctaagattttaacattaatgaaaacaaagattcccacagcccaaaatttgctatttgaagctgcagtcacaaattgcaaaataattacatgatgataaaaatgtgtcaacataaacatgaaatgtcatgattttacagctaagcaggcaatagctctaagtctgctaatcagctaagagaatcagtttggcaactgctttaccttttgtaggcattggaaccccaccttaatggaggaaaatgatgattttctgtgtattttcatgcttatttaattttcattgttctttttgttcaatcttggttgtcaattacctatactaatatagtacaacaacaacaataataaagatagttttacgttttcttcttccaaatgcctcatcaatgcatatagacaatatcactccctatgtttcttacctcaccaccatgatatttatatgcctttatggccagagctctaatgattgaagaggtgatattattctggccaacactcaggtaatgcctatgtattcttatcttcatttaaaatatcattcgtctctgtataaccaaatctttgtaatatattttctttctgaaattctgatattccttagagattgtttttttctttcattattgcccccctcattattttgagctttgaatggtgtctactcaggctaggcctacaaaatgtaggccactgtcctggatcaatatatctgcagtgctaagcagggaactagcatagaaatgttggctttttacaacagaggattctgccattagaaaggctggtaaaaaccacagagtgccattggcaggttttgcatatacttgacattagaggtaaaacaagaaagtgacactgaacatttagattctgtgtcaatgtcaagatgaagatgactttcaaagtggaatcatagagggaacattctataaaaaacattccatgtctttctagaaaaatccagtgtaagctttctacctacttgggagagttttgccaatgataacatattttagaattcctggaatagctcaaggcaaatacatattttgaagctgaaaggatttctatttctttctcttttttaaattttgaaatattattttcttttcctacaatatgttctgatatagtttccctccccagcttctcccaacttccccacccacccaaatccataccctttcattctctctctcattagaataaaataggtacctatagtaacagcaactgtaataagaaataaaacagaataaaattcataagacaaaattaaggaaaaaagtataaagagccaaagaaaaagcacaagaaacacctacagatagtgaaacacacacaattacacactcagaaaagaaataaaaacaaaataggaaaccataataaataagcaaaagatctctaaggttaataaagaaaaatcccgatgggtgttggtggtgcacacctttaatcccagcactcgggaggcagaggcagacagatctctgtgagtttgaggccagcctggtctctagagcaagtgccaggataggccccaaagctacacagagaaaccctgtctcgaaacaacaacaaaaaaaaaaaaaaaaaaaagaaaaaagggggggggtggggggcattccctctctttggttatggtatatgtgtgttggtgcatgtatatgcatgtgtatgtgtatttgtgtgtatgcatgttggagtatgtgtgccagtgtatgtatgtttgtatatatgtatgagtgtttattcttttgtacatgtgttgtagttcacataaaatctcctcttgggcccacccaagcttctacctgactctgttagttttcaggaccggtacagaaacaagatggtttgaggtgtgcctttagttaaagtctagtgagaaaagcaaggcttcagtgtttgtgattctaataggaacagtaagtgggccatgaaatgaaaacactttcacgtgctggtccattgtataatggttaccactctgaactctgaaaatactttcatcttgcttttaaaaggccttcaccacacagtccagggtcagaattcttcctgaaatagaagaaaaaaacaaaatgtcaaaatttgcacttttccctaaatccaaaacaaatcatgttggataatcgtaattgaaaattcttcaattttatatacaattaaaaacctgtgaacaaaggctgggttacttggtaaagttaatgcttctttcagactattagttagggaactagtttaagaaataccagattattatcaatttagaagcaaaaatttatgtttacactttcaaaataatttatcaattacatgtatctaattaagtttactttcacatcccattctactgaagtcacataattacactcacatatgtcaagcaataaagaaattgccttgggtcaccattatttttagatctcagtgtagcacacagtaaatggctaacacagcaataatgcttaattatactacagtaaaagttgaaaagtcagaggctagtccatgatcctgttttttagaagtcccccaagcataggtattagaaaccagcaagttccaggggttcttcacctcagagtcataaaaagacaatacaatcagaataccttatgctttgatgtggctgtttcagtttgttgttgaacaacagttcaacagtttgttgtttcttctgtgaaaaccttttcttggtcacaaatttaaatcaaatttagcaaaaattctgttaagagaaagacaggcagatgtccgcttcctgcatcactggtgctgcacaaaagcctgaagtgaaatctatactcttttttgatttccatgtaggttccatttctagattgtttccagcacactgtccattgtatctttaaacaaagactaggtcaaagatgacatgtgttcccaataacttacaaagaacctaccagtagaagaatcaccttctgccttcccctacagtccctttaagccaggggccagtgttgtacacagatgtttccttagccaggaagatcccaaatatgattgtggatttacaaatgcaatcaatttagcattttggtcacacataacaagagcaatgattgtggtaaagaatgagcagacaaaatgttttattaatgtctgcttctggtgtgatgcatatgccacatgaaacttggccaaactattgcaggataatgattttccaaaagcagcagaaagcagatgggaagcatgattccaaggtcaatgatcacacctaggagatggttataggtcttaacatattttattgcttatagtaaattgtcagcaaaatacctcttggtaagttttaatttctatcagaattatttattgatatttacatatatatatgtgcacatacacacacacacacacacacacacacacatatatatatatatattaattcatttaaaatttatcttagtataatatcttattagttatttgagaatttaatacaatatactttgatcatattcacctgccattatttctcctaaattctgttagatctaccaccccttttaataatccaccaagtctatcctgcattgtctctgtctcctgagtgtgggatcattaactggagcatggttaacctatgaggaaggaggcacaaccttagagaaaactgactctccctacgcctgaagctattcattgccaatagatttctaatcagagaagagtgcttgttaaaccccccccccctttccatgctggacttgatcttgttgaggtcttgtgtagatatacacatttactgtgatatcctgtgtacagtagtactgtcatgtctagaagaaaaacttgctctactcatccctggcctcactcttacagtcttcctgccattgctgctgtggtggtccctaagccttctggttattgtatagatatcccaattgtagataagtattccacttaacactttgtattttgacaagctgtgaacttttatcttgtgatgttttgtttgtttgtgtttgtttgtttgaaacaagatttccccatatagccttggctagtttggattctaaaatgtagaatatgccaaactcaaattcatggaggtctgcctgcctctgcctctcacattaggaattaatgctaaatgccaccatgtgaacaagttgtgaggtttgtaaaaagttttttttttgagaatttcatccatgaatacaacttttccatgatttcaaaagaaactctttatccaataaacaatgcttgtccatcatcctttgcctttgaatcctggaaacagccaattgtatttctctttgtacaattttgacaaactcttatattttctctaagtggaaaaacacaatattggtcttattgttcataagaatgctaaaaacagtcttctaaggctgtgagtggaatgtagtgcctgagagctggatgagcaggccagagaactttggtttgatctcctgcattaaaaggcttttataaagtggtttcaggtttctaggaaactcagaagacttttagcaaatgttgctccttcttcagcaaacaattcaaagataacaataacatacagtatcatacagtaacatacagtatcataacaataacatacaatagcaagactttgttttccatccttacttggcttttttattactctatttcttttacttttattttttctattttttgagataggtttctctgtgcaactttggctgtcctggaatctactctttaacctaggctggcctttaaatcacagagatctgcctgcttctgcctcttaagtgctgggattaaaggattgtgccaccacacccagctactctatttcttttactattatttacttttttattttatatttttataattataattagaccaattttaaattagaaacaagcttcttttacatgtcaatcccagttccctctccttcccctccttacctcccctcaatactatcccaacccctttctgctccccagggagggtgaggccttccatgggggatcttcagagtctgtcacatcatttggagcagggcctagaccctcccccttgtgtctaggctaagagagtatcactctttgtggagtgggatccaaaaattcattcgtgtactaggaataaataataatccactaccagaggtcccatagattgaccagacctccaaactgacatccaccttcaggggggtctggaacagtcctatgctggctttgcagctatcagtctggtttccatgagcaactctttgttcaggtcagctgtttctgtacgtttctccagcctggtcttgacccatttgctcaccactcctccctctttacaacttgattccagagttcagctcagtgtttagctgtcggtttctgtttctgcttccatcagctactggatgaaggctctaggatggcatgtaagataataatcaatctcaatactggagaagggaatttaaggtagcctctcaactattgcttagattgttagttgggggttaaacttgtagatatctggacatttccctagtgtcagaattctctttaaacctatagtgcctccctctattatgatatctcttttcttgctctcctccattcttcctctgactaaatcttcctgcttcctcatgtcctcctattctccacttctctttcttctagctccctctctgtcagaagccagccttggctagctaaccgccagatagtctggcatcccacgatgtcgatgtcagaagccagtcttggcgaccccccatgcctagctagccaccagccagtctagcatcccatctcttatcacaggagattcctgctacctgcctgagaagcaactaacacctatcccttcccccacttccttaacacaggagatttcggatacctgcctgagagcaattaacattcatccctccccccaccttctttttctctgcttcctcctttctctataaaaaccccttgtaataatcaataaagttggccttgacaaaggaatctgcttggtcccactctttctttcccgcccattatttgcaggcgtgatccacctcagactcacaaattaccagagccccactggatggggcccctctcccctccccacatgctcccaattagttgtttgttgctttcctctttgctgaagatgatgtggagaaaggggaacacttgtgcactgatggtgggagtgccaactcatacagccactttggaaatcagtatggcggttcctcaggaaaatgggattcagtctaccacaagatccagcaattacactcttaagcatataccccaaagaagcacattcatacaataaggacatcttttcaaccatgttccaagcagccttatttgtaatagaaagaacctggaagcaatctatatgcccctcagctgaagaatggatggagaaaatgtggcacattcacacaatggagtactactcagcagaaaaaaacaaaaaacaaaaaacaaaaaacaatggaatcttgaaattcacaggaaaatgtgtggaactagaagaaactatcctgagtaaggcaatctattcacaaaaagaaaaaagttgtatgtacatcctgatacatggatttcagatatagaacaagggaataccagcctataatccacactgcaagagaaactaagaaacaaggaggaccctaagatagacctacatagtccccctgagaagaaaaggactctttttcttttataaggactttatctttttttaatttttcatcccaagcctatgtatatttttaaacacactagaggttaaaaacattagaggtttttctttcacaaggacatcccccatcaatatcttttgccttacagaaatatctctgttttcaggaggtcccacatattgaatgttgatctcagtgtgctactggtattatatttaggaagttgtgtcctgtgacactaggtaagcaatagtggagagggtgtttgaatgggccttcctctttaatcagatttgtgactaccagaattgttatcatagaaccttcagatggaatctgacttacagtcaaatattgagctgagctcttggagttcattaagagagggaggaccctccttgaacaaagagggtcaagagcatggtggggaaaacctcagggacagcagactcaaggtattgggagcttatgaactatggactgacagctagggaacctgaatgggacttaactaggccctctgaatgtgggtgacagttatatggcttgatgggggggggtggcagcggcatcaggacctatcccaagtgcaggaactgactttttagatcccattgtctgtggtgagataccttgatcagccttgtacctggggaaggatcaagttctgctctaaacttaataagtcagatattgttgactcttcatggaaggccttaacctctctaaggagtggatgggggtgggaaaggggaggtgtaggtgtggggtggaagaagggtagggattgggagctggggtttgtatataaaatgaaaaataaattttagagaaaaataaaacaaaaatagggataaaggaacttgaaatacacacattgtcagcaataaagcaaatatcctgacttcaattcagaagaaccatgaaagcagatggtgaggctcacagcctggactttgtccatgcaaatgttgttgagtaccggtggcttcatggcctttctgacaatttccattcagtacagccatagcagggattcttacataagtccaaatttttgctgatgtgtctatctagagagtctgcatctaaacacaaaaggagtaatctcttcttacgtttcactttcacttactccccatcatttacttacatttctaatgtgaattctctgtggaaatacaatttgaaaaaagaaatgtgtgctgtgtggttatatcttccaaactgttagtcacttgtaaagtatattgtgtatggttttcttttttcttttccttctttctgttttttgtttgtttgttttatttttggaaaggcatattgcaggaggagttgattgtagacataattcttcacagcttagaaatgggttagtatgctgttttgctcaacaatatgagtaacttaagtctgattttcatatcaatcagagtcctttacccaatttcacctgacagccttaacatttatttttgtagcacatatagaattacctttgtaagcctttgcttgcaagaataaatcatttatttgttgttttatattttgagggaatgcacacaacccttctggaacacctggaattttctattttaatattgaaattccattctcatctaaactattgtcttcaatttcttacaaaacaatgttttgttataaatccatgaatatcttgaaaggcattaaaagagccacatttatggaaagaaaagatatttattacattgttttagaaaaatcattgacagttaaatcgatacaaatcttaacttgtctaaatacctatacatgactgaaatctccagtgttataatacaaaatcaatgatatttccttatggagaatgatgatgtatgcatatgtatatacatgtggaagtccacttgtccccttgacgttctgtggggagtcatttatgagcataaaagtaagaggttattatggaggaggagctatggggtttaaggaaggcaataatcttagtcatttaatcgaagttttaagtggcaagaaaattttcccaattttttcccaaatattcttttaagtatcacatgtgctcctgatttctgaaatccaaatttagatcaatagaatatgccattatttttaatcatcactcaatattataataattatcatcaacaacaatgtaagcatcactacagtcagaggtagtagttaaagggaatctatttcattacagttatatgttcagtcatcatctcattttataagtcaaacatgacttttatgtggttttcaagagtctgaattactgttctattgctgagaagagacgccaagactcttacattgaaaagtatatattggggtgcatacttacagttttacaggcttcataccctattatgacaggaaacaggcatgtgctgcaccaggagctaagagctttatatcctgttccacagtcagtgagtggagaaaaagtgacactggccctagtgtaagcttttgaaacctcaaaccctacccccagtgacacacatccttcaacaaggccacacctcttaatccttctaatctctctcaaacaattctactccctagtgattaagcattcaaattatgagcctatgagggaccatttacatcaccacaccaaataaccacacttcccactgttttaacaagtcaaacatcactctcataaggtctttttctttattgtttataggcaggatttacctggcagctacaaccaccaaaagacatcagaagggaaatgatgacaaaggaaccacagaagctctgagtttaagtcacatactactatctctggacaaatctattggttggaattagaaccctggcttgacaccagtgcacatgcaaagtttttggaacactagtggctccttctgtatccttctctacattcccttgcaccttctccaaactctaccttctgtagcaccttctacaaagtcttcaccatctctcaatgagaaagtagttcacatggagccgtgatactctcattcctaccatcttttgccttaatgattggtgcttgttttctgtgaatcacaaatttattttataatttccaaaacagaaatgggtttatatcaggaaagtctttgactggctggtttccaaatggctttatcacacttctctttaattgagcctattaatttgtagttcatttaaaagtctttttacatgtaaataattttagtagattaatacaaatacttcaatgacttcataagaaacgagcgaaagaaaatgccataatcaaaattagcaattttaatgagtgtaatagactgcattttcactgagatttataccttttaaaacaaagttgtctacatctcattaaatgcacaacagaccacctgaggctcattagtgtttccaggtataagaagataattagggatgaaggaatcaagggacttgccccaaagcaagacaaattatgttacagaatctggatgttcagtgtatgtttgtgcaaattcttcattacttattttactttattgaacaggcattaggagaaagtttctggatcccttaaattgcatataaaagacaccacctactctgagcaaatgattaataatactgataaaaggtgtccttttattcttagttgtaattgagaaagtaaaagacagacaaactggcaaagaacatgttataaaagtcctggaaaatgaagaaaaaccaccccaaacttaatgagattctgagaaccagaggacgataacgcaacagaaactgaacaccaatccaatgtgcctactgtgaaagacttcatgagatgccaaacaaacaagaatgtggaccatgtcaaaacacaatttatttactagaattctatgagggaagatggaaacaaccattggaacaataacaaaatgttctcactgtcatattttcaactatcaaaatctgacaaaaaggaattttgttttatggatgacactgatcaaggcttcaaaaccccaggtgtgtgcaaactgggctgggagtagctgtcacatcatcagacagcttatttgggaacatttcaacctcagaccagcctatttttagaaggacatttcctataactcagactaagaatggatcaaaaatggggtggcttacaaaaagaaatacatttcacaaagtttgatcagttcactgctttccacattgatcaggtggaatatgtaggtccattaatccttaataagataaaagtggttgtctgaagctaaaagggtatttgtgagacatgatgctactattaaactcatgaactcacaatggctgtgactgcacacacaacaggactgcaccagacacaaaccagtcaaaatcttggaatggacaaggaaagcattcatgaagtcattggctattgttttctccagggatatggcccatgaaagtctatccatgtttctgtagatggtcctatactcaatgcaaacaaaggcatggctaagtggactcagttttatggttgttgatatctgtttgttttgtacagcatgtaaagttaagaaggaaaagcggcagaaaatgcaggagaggacttagaagggaatagggatggatccaaacatgttatatgatatatgaaatccttgtaaaataaaggtaaaaataaagaaacacaaggaaggaggactttctgtgtctaaccttctagtatgtcagtggaagtgggaggtagagaaaggatgctgagagatctacatttaaaggaattgagcaggatttggcatttttgccatgagccattattcagtgtacaaggacatgggagggcccaactacagtccaacattttcaaaagtctgcatctccatcataagaaagagtagttttcaaagcagaactgatgttttccagaagactactgtcaaatagaatatatttaggacatcatttgctgtttatcatgcatacatgacattttctggtgatggagcttgtatgactggtacatttgcctctttgttctgctagatcgacagcttggtagattataaagtagtagtaaaaattcaacctgtgaatatgcataggtaaacctgggaattttcaaaatattttatgataaacagaaaaatcagcgactttataaggttgattaaatagtatacagaaatttaggaaaagactctttgatatctcacttcaaagttcatcttcctttcacaaattcacttattaaggtggaatccacttacattaaggtatgaatgcattctcaagtatactggaaaattgtctttaaaatggtaaattttagttgatagaaagcaatttgtcttctaggattcctgatatgtttgtgagtcctcctcctttgtcttttttctctgtgtggtgtgttttttttttatatacagaatgtatgtgtacaaatgataaatgcatgacatcaataaacatatttttcctctcttttgacttgtcatgatatctgccagattatctcactaaagatgattaaaatctttataaactattagtgttcatgggactgataacaatgatttacatcttaaaggagataggaaacacaaggtattttaagccatccccaattttcaaacattagaatgagtttttctaagttagtttgtctgcttcccccaaagaatgatattttatgcattttcttctgtatttcccccaataattttgaggagatgggaaaatacctatgcatgttctccccatgcagagaggaagctggcaatctgaaagagcatttcctcccagagagtaaaacagatgggtgtttacagggtctattcagacctgcctctttcatcttgaagttcttgtctgttagtctttttctccaaataattgaacttggatgatgttttcctgaagtgggagagcaggcacactttgaagtgtcactgggagctaaaaggagagagactaagattttctcagaggcaaagcgataggagagaatgaaggatgatgagcttcagctcagggatttgaggacctggatgaagagatttgattagctggttcagggagaaaaaaatcgataggaaaggtgagccatttgaaatcatgaattgagggaagccctggatcaatctgggctaggaattactttttctaaggctcagacattctattttcagtcagataggcttagaataaaatcataactagtctgaaataaattcatggatgtctaccttataaaataaaaacaaaagtttggaattgagttgctaagaacaagaagattcttaaacatagtacttctgcacctctctatatttttgaaggtatattaaaaattattgacaaaatggtccaaaggttaaaactgagggtacaggttgacagggttgaatagtgtttatataactgaatcatccaaattcaagactggattaaaatggacagtttatttttcaaggagttggcaaggctatcatcatttggtgaaatgaaaagcatggttgtaattttttgcattgaagtatagcacacatacaataactactcatcatcaataaaaaaatacttaaaatcttaaactttctccttcatcatcaagattctacctctaaaaagtgtcaatttaaacaaagcaggattttggaggcaggagctgatacagaggccatggaggagagctgcttaccaggttgccccccatgttttattcaaccctgttctcttatagaacctaggaccacaagtctagggttggcccaactcacaatggactggggcctcccacatcaaacactaatttaaaaggtgtcctacagatttgcctataagcctgatattatggtgggattttctcagtctagatgactctagcttgtgacaagtagacataatgagagctatcacaatcaccctttagattattccactaccaaactccaacaaatgagatatcaaaaataagaaaacaaaatcaaaatcaaggacaagcaattagaattaatttttaatttttaagttaattttattttattatttttggtttttcgagacagggtttctctgtgtagctttggaacctatcctggcactcgctctggagaccaggctgtccttgaactcacagagatccacctgcctctgcctcccaagtgctaggattaaaggtgtgtgccaccaatgtctggctagaattaatttatagaagccttttttttttaaataaaaagacaagaggagccccatagatttcccaggcctcttaactgacacccacgtttagggggtctggttgatcctatgctggcttcccagctatcagtctggggtccaggagctcccccttgttcagatcagctgtttctatggatttctccagcctggtcttgacccctttgctcatcactcctccttctctacaactggattccaggagttcttctcagtgtttagctgtggagcctctggcaaatagatcaccatttacccctagtatccaaatggactttgggagcccattccacatagaggtatactctttcagcaaagacacaagtggccacctaggccctgctccaaatgatgtgaacagactttgaagatcccacatggaaggccttaccctccctggggagccgaaaggggggtataggggtttggtgggagcaggagaggagggaagggagagggaactgggaatgacatgtaaaacaagcttgtttctaatttaaacttaaaaaaggagaaaaagacaagaggaagaagcatttctcaaaaatatttaatttcattttatttgactatatgaatcactaattttccacaggctgatactgcagctatcataatagaaactaaaccaaatattttatatcaataattgagaagtgatcaccaaaactttttcctcactaggtaccaaaattactaaccaaatgaattaacttccttttttagaggagaaggaccttagaaatgaaaaaaaaattaattttgggtatgtatcagtctttaaatagatttttaaaattaacccattaatttgaggtttaaaaaattcctactgcagcttttttctccatcattttatttaaattagaaacaagattgttttacatgtcaaatctagttccctctccttcccctcctaccctgacccccactaacatcctacctatcccataccaattctgcttcccacagagagtgaggtcttccaaacacaaaagaaaataccttattttcagcaccctatggaatcttttctaaaatcaaccacatactcggcaacatagcaaacctcaacaggtacaaaaaaatttcgataacaccctgtgtctaatcagaccaccatgctttaaagttagaattcaagaacaacacaaattgcagaaaacctaccaactcatggaaactgaacaatgtacaattgcaggattcctgggtcaaggaagaaatacagaaagaaattaaagacttcctagaattcaatgaaaatggagacacaacatataacttatcttttatcataactaaggaaaaccataactatcggtctgtaactccattaaagagcacagaagggtaatatataacctctagtttggacagaatgctgtaaagcagtccagacaaaagcagttttttgtccaaatggccagttttgcctgctgtttctgtcattacttgcacctttaggaaggtgcactcttgcatttcctgcttaccctagtaatgttgttttccttcttaggcctttgatgaggttgaagactacataatatcctctcttatcttatatagaaaacaataggtataataggcactagggaaatgtctggagatctacaaagatgacaacaactggcaatctaggcaacagaaaagaggctaccttaactgccctcccctgataatgagattggtgactggcttatatgccatcctatagccttcatccagcaggtggtggaagtagaagcagacagccacagctaatcactgaactgaactcaaatccagttgaaaagaaagacgagtgatgagcataggggtccagaccaggttggtgaaacacacagaaatagatgaccagaacaacagggagctcttggtccccagactgatagctgggaaaccagcactgcactgatcccgaacctaggaatgtgggtgtcagtgaggagacctcagaaatccatggggcctcttgtagtagatcagtacttatccctagcttaggtgtgtactttgggagcccattgcacataagggatactccctgagccaagacacacggggtgggttaggccctttcccaaaggctatgacagacattgaagaccccctatggaaggcctcaccctccctggggagcagaaagggtatgtgataggtagagttttagttgggggagggtgataggggaggatgggagggagagggactgggattgacatgtaaaataatcttgtttctaatacaaataaaaaatggaaataaatgaaacacttaataaaattttcatgagaggttgaaacctttaattattaaatgggttcttttgattacctatgtatcttaaaaacaaactgtactaaaagtttcagattttctagcttcaataaaacctttattatttataataaaagaagaaaatactaggtataatacttagactttctagattaggacagctatgggagtaatctcttgcatatgctaatgccttgggaatggacatgtagaatgtgtcgattgctcattgttgctcttgctggttgtaggtctaaatttgtttttacctctccttctcctggtctatacttgaagtttgttattgtatattgttttcatatgagacttgaaacccccttatttagatgaaaggggaattgtagtggcatcttgttttgtcagtgaacttgtggttgtggccacactctgggcatgggttttaggttcagatatgaccccttgtaaagtaatggatggactggctttcagtctcttgggttgcagtaagagcattgaaagggcagagactgcatcttctggagcaggatgaccatgaagtgttatttactcttatctgtgtaagtgattccctaataaacacctaactatcacttttcagggttctgctagactcatttaaacctcaccttcattttctcttttcccatcaacttctaaataagatatatttctgaataaatttcgattttctttaaatttcctatttatatctgggagaaaggctaatatgttttaaaataaaagtgaatcattaggagtcattttaataccatgtgcatttaagtaaataatggtattgaattcaatgctcatcaaagcagcaccttctattagaagactgtgaacacaagattctcaaatggtcaaaactctcagaataagagagtgaggagtgctcagtcctaaagagaacatgcttattgtaccacttcctgaaattctcagggaacatggcagaagatggatcagatgtgggtagaaggtagaagatgaccaagaaaccaaggccgttacacttctgaattcacaagagttttaacaatattcactcaaactacacaaactcaagccagacaaaatttcagcacagagcacaaaagatgggtgcaaaattccaccactgactgaagagctattggcatttgatagctactaggaaaggaagtcaattttcttcaaaaatgtgacacttggttatttgaccacattctggaaaagatcccatacccaagaatatttggccaacacacattggaatccatgaagaaaaacaaataaagaaaagagctggatgcttggggaatgagggtgggattaagggatgttataggatgctttgtgtaacattctcaaatacttaataacataataataaactaaaggttaatcatctttgaatattttcattacctataaattgttccattaaaactcatttgtactagaatttataaggttattaattttaataaaataacttttagttggtattaagctatatttataagaagcatctagacgtcttaattttcattcataaatatactcaatatggaattctgaatcaattcattcatatattcctgtagttaagatattcattttgggaaactgtatgagattagtgtgagattgaatgacacaggaattcaaataattatccactgtgtggcaactgttatcatagtaaaaggtatagttacttactattgttatttagaatgttgatttctgtacctgtttttaattttaaattatttagacctcattttaagtgaatggtcagacttttcagttctatctttgttgagtaactaaatgtagagttcatgattagaaggcataagatcctggttcattctccagaaaataaaaagacaaaatggaaggaagagacagaggaaatgagagtgaaagtacgaaagggaaaaaaaggaaaaaaggcaattttatattgaaggaaccagcttccttttggcagccataacagccgaacacgtgcttgccataaacctgccttggtcacgtagaggtcagatgcctgtctcgtgacaaggaaccttagtcacttagaggtcagatgcctgtcttgtgacaaggagccaatcggaagttagctggtggcgctatgctttacgaccctgggtgtgctttacggacaagcgcacgacaatgacgtagagagcatagcaaccaccctgggagggcctatgggccataacaaccagttgaccaatcaacacagggcaagccctccaagcctggaagcacaccaattgtgagcctgtgcgtaagcctgtgtgtacccctagacactccccttacgctgccctataagatcttttgggagacccaaggagccgtctttctctagccgtctgccatggcgggtgggtgaaagacccgagctaacatggggttagttcgttaaattacaataaagcctcgtgcagtttgcagcaagctctcgaatccgcctggtgattggggtgaccgcgaacctggcctgagaccccggttacttgagttttcgggggtctaacaatattacaataccactttttctccaaacctacaactaaacaaaaaacaaaaaatctgaataatcttcaaaggtttagaagcatgtaagataattttaaattattgtattttgtagaacatatgtatcttcaattttaaatgttcttgggagaatgtgtaaaatgtgaacattaaatttgaagatacatatactatattttaagggattcgtacctcaccaatcagtaaatcccaaagaactttattgataataacagttgtaacacattaaataaatgtattaattaatcatatccatgtcttgcatgtgacataatacctcaaagatctgttgaaaacctaagttattaaattttgtgataatctaataaaatctttaatatggcttcttaagattttttttcctttttggaaaacaatcttttcatacaatgtattctaatcatggcttcccatacctcaactcttcccagatgatctctactgcccccactcctcacctaccaactccacatctcctttaaaagtacaacaatatgatatataaaagttcatgaatgtatactttacacaaaagttttgaaattattggcttttagtaattcaagaaatgccttgtaaattagagcatgaagaaaactgttttaatttattcttcgcctatagtgacacataggacactgtaaatgaagttttgaaatgttttagcattgtaattaataaaatgaatacaaatgaaaatggtcatttgatcttcccacctgaattaagactgctaccttttctgaagttaaacaggtggcatcatgcattgtttatagtcatggttctgatcacagtcttcctgctgcttacagacccatgagtggacctctaggggatccattactcttaaaagtctctcaaaaaccaggacttgtcttcatgaggcctgagagcacatatgtgttaaacctgctcttggtccataatatgcttcccctctcacctactgatgtcccaaatctattattttaggtcccacactacatacaggaattgccctgcccagtttgcttcactagctagattcatctctagtgatgagtccttaggctgtaatatctgtacctgttgcttcttcagtcagacactgatgagcacagatgctcataccaatgtacaaaaatgaggaaaaaaattggggagaaatgaagtatgtattgcttatatgaagatgatacatatctcctgtcttcttactcctgttttccctgtggactatgagacagtatttttgtgtttgattttagaagatgggaagtccatactgactatggaggattgatgcatataggagaaaagtactagaatatccggtcattgttaagtgaccatagaaggcttgccataattgaaaatgataaattgtttgattttctacttgatcattttcaattattgaataatcaaaaaccaaaaagtaaaacagaggtttgaatctcaacttaacaaatgctgaagagatttataattgtcgctatcaaggagtgttcaaatattgccactcatttcttctgttaattaatatttactaatatacacataattttctaaatgtagaatatgtatttactttttaaagataaagcatttaatctggggctcagttttagaggcttagtaagtgactatctataggtaaataattttgaaaaccactatgtaagtgacagtagggaacaactatgaaaagatcctttcacatctccatgatgaaaaaggaaggatgggtgaggtaacccaatcgcaaaaagacaaacatggtatgtactcactcatatgcggatttnnnnnnnnnnnnnnnnnnnnnnnnnnnnnnnnnnnnnnnnnnnnnnnnnnnnnnnnnnnnnnnnnnnnnnnnnnnnnnnnnnnnnnnnnnnnnnnnnnnnnnnnnnnnnnnnnnnnnnnnnnnnnnnnnnnnnnnnnnnnnnnnnnnnnnnnnnnnnnnnnnnnnnnnnnnnnnnnnnnnnnnnnnnnnnnnnnnnnnnnnnnnnnnnnnnnnnnnnnnnnnnnnnnnnnnnnnnnnnnnnnnnnnnnnnnnnnnnnnnnnnnnnnnnnnnatagagggagacatttttggtttagagagaaatcaggcgctagggaaatgtctggacatctacaaagatgacaccagctaactaattcagcaatggaggagaggctaccttaaatgccctcccctgattatgagattgatgactgacttatatgtcatcctatagccttcatccagcagctggtggaagtagaagcaaacacccataactaatcactgaactaaactggaacccagatgcagagaaggaccagtgaagagcacagaggtccagaccaggctggtgaaacccacagaaacagccgacctgaacaccggagaacacttgctcccagtctgatagctggaataccagcatgggactcatccagaccccaggnnnnnnnnnnnnnnnnnnnnnnnnnnnnnnnnnnnnnnnnnnnnnnnnnnnnnnnnnnnnnnnnnnnnnnnnnnnnnnnnnnnnnnnnnnnnnnnnnnnnnnnnnnnnnnnnnnnnnnnnnnnnnnnnnnnnnnnncaagacacacagcggtgggcctaggccctatcccaaaggatacaaaagactctgatgacaccctatggaaggcctcaccatccagggggagcagaaaagatatgtgacagattggggggtgggtagggaaggatgggtgggagaagggaactaggattgtcatgtaaaacaatcctgtttctaattcaaataaaaatgttggaaataaaaggaaggatgggacagaaaaaaagaaatgagagagaaagaaaataaggaaggcaaacatgaaggaagacaatgctgcttgacactaatggaaccaaaatatgccaagaactcacaatagcacccaactcaaagaaaacagcaacaaacttacaaaaggtgtgaataatttgaaatttatcatttttatttacaagatgttattcctaatgtgtgtcttcccattacctaaatgcatctaatttcccacaaaaataattgacttcctctcctaggtattcaattaatctctcaacattctctacctgtggatacatatttgacccacacatgtcagctatgtggactccacacagcacctttgtacaatcagctgtcagggatttctcttgaagtctataaatgcattcaaatcattctctgagctctgagatacatcttactactttgatctaaaattctatcaactcaacttcattcttttcacatttcttttactcttttattcatgcttgtcatactatagtcttatatgttctggaagcattgcaaattttactcaccttttaaaattttgaatattattcctcttaaatattgtcttcaccccttatttttccaatgaaatcctactcattgtcctaacaggttttaagagtgtcaattcaaacatcgttccctccattgaggagaaaacatgtttgcttactagtatattcagtaaaaacatataaaggaaatattattttctgataatgatgtgagcactgtaaaaccagaggcaatctaaacatcaaaatttccttcatcacttcatcattgcattaacacacctatgtggggtttgtacagtaatcagaaacagattattgtaatagccttttatatggagaagagcactttaaaatcaactcatgacagttggaattctctaagaaccatgactaaagtatttatttgaatgacaggtgtccttcatagacttcattctatgaagtcataggccctttaaattttgtccctgaatgatggccaaatgatgttcatgcatctttgatgttatgattaaacagggtcccttgatatcaatccctatattattatcagaaactataggttctatcaactgcatccaaaggactctagcatggcaatttgaaaatgctcttgagggcaacacatgaacagaatgttagaaggtaagatgtttttaaattttccctttgctctttcaattgtaaaactagagtgagtttaattccctttgacagaggtctttgccaaatgtctctgcaaatgtaccatcatacattatttagcaaggaccatgctctaattcatgcagtcagcatattcttatgttcattagagtcctcatactaagttactaagtgctctgtgcaatagtcctgctttaggtattgggcttcttaagagctcataccttagaccatttgcatattttgatttaatgtgaaatgccacacatgaattcacatgcttaaacatttgttccacaagtggtggtggcatttggcaagtcctggaacactgaagagacagaagaaataggccttttgcctgggtttgaagttttctaattcagtgtggggaccaaataattgttatgaaatattttggggcccagcctccagctccagcaaacaggggcgtgggaaagttccggactattgtattgttaattgccagtagggctgctattgtttaccatggcctcagggtaaaatgccttctatttgcacctctgtgggcctaagcatctgaataggcctgcacctgggcagaggtgggaggtgagtgagtaactagggaggaccgagttaggggccatagaccccgcagagaggagaatgaggagagaaatagttcccttgtggtcatgacaggacagttaagaaacaccagaaaagatggctaataaagaaatgattctagttctacaacatggaactaagagctctctaaagatgacaagatgcctgtgtttgatctttatcgccgttgggttgctgagttcccccccccccccccccgcatggattaaggctgagacatgctgggacaggacaatccagttaccttcctgttttccacttccaccaagacttgagaagatgagacttgagaagagcatctacatgccacgaaggagatggagggtgccatgacttccttcagggacagactgtgtcctctgaaactatgtaaaaacacacagtttccttcaagtgcttcttgctgagtatttgatcaaggaaacaaacaagtaccagttttgtccagaaggcccagaaggtagagatgcttgatccagatgccatatgggaggaaaggattaaattgtcttctaacccctacatgtgtgccttagtgtgtgtgtgtgtgtgtgtgtgtatgtgtgcatgcacatgtgcatggacatggtttagtacagtcactatcactaaataaattcaataacaaaagaaaataaactaagaccatgtacattacatattttctaggatcatgcatgataaaggatgggtggtcaatatagttttctctgatggcctgcatagaaagcaatgtatatggcttcctgcatataaggcattatccatagcttcctgcattaaaataagaatattttccctgatctgtttttatttagggttgtttttctttttgtgcattttaaatgtttgtgtgttagtcttgaaggaaccggcttcccttttggcagccataatggtcgaacatgtgcttctatgaccttgtcctagaaaccagaaagtcagatgcctgtctcgtgacaaggaaccaatcagaagttagctggtggcgctatgctttatggctctgggtatgctttacggacaagcgcacagcaatgacgtagagagcatagcaaccaccctgggagggcctatgggccataacaaccagttgaccaatcaacacagggcaagccctccaagcctggaagcacaccaatcctgagcctgtgcgtnnnnnnnnnnnnnnnnnnnnnnnnnnnnnnnnnnnnnnnnnnnnnnnnnnnnnnnnnnnnnnnnnnnnnnnnnnnnnnnnnnnnnnnnnnnnnnnnnnnnnnnnnnnnnnnnnnnnnnnnnnnnnnnnnnnnnnnnnnnnnnnnnnnnnnnnnnnnnnnnnnnnnnnnnnnnnnnnnnnnnnnnnnnnnnnnnnnnnnnnnnnnnnnnnnnnnnnnnnnnnnnnnnnnnnnnnnnnnnnnnnnnnnnnnnnnnnnnnnnnnnnnnnnnnnnnnnnnnnnnnnnnnnnnnnnnnnnnnnnnnnnnnnnnnnnnnnnnnnnnnnnnnnnnnnnnnnnnnnnnnnnnnnnnnnnnnnnnnnnnnnnnnnnnnnnnnnnnnnnnnnnnnnnnnnnnnnnnnnnnnnnnnnnnnnnnnnnnnnnnnnnnnnnnnnnnnnnnnnnnnnnnnnnnnnnnnnnnnnnnnnnnnnnnnnnnnnnnnnnnnnnnnnnnnnnnnnnnnnnnnnnnnnnnnnnnnnnnnnnnnnnnnnnnnnnnnnnnnnnnnnnnnnnnnnnnnnnnnnnnnnnnnnnnnnnnnnnnnnnnnnnnnnnnnnnnnnnnnnnnnnnnnnnnnnnnnnnnnnnnnnnnnnnnnnnnnnnnnnnnnnnnnnnnnnnnnnnnnnnnnnnnnnnnnnnnnnnnnnnnnnnnnnnnnnnnnnnnnnnnnnnnnnnnnnnnnnnnnnnnnnnnnnnnnnnnnnnnnnnnnnnnnnnnnnnnnnnnnnnnnnnnnnnnnnnnnnnnnnnnnnnnnnnnnnnnnnnnnnnnnnnnnnnnnnnnnnnnnnnnnnnnnnnnnnnnnnnnnnnnnnnnnnnnnnnnnnnnnnnnnnnnnnnnnnnnnnnnnnnnnnnnnnnnnnnnnnnnnnnnnnnnnnnnnnnnnnnnnnnnnnnnnnnnnnnnnnnnnnnnnnnnnnnnnnnnnnnnnnnnnnnnnnnnnnnnnnnnnnnnnnnnnnnnnnnnnnnnnnnnnnnnnnnnnnnnnnnnnnnnnnnnnnnnnnnnnnnnnnnnnnnnnnnnnnnnnnnnnnnnnnnnnnnnnnnnnnnnnnnnnnnnnnnnnnnnnnnnnnnnnnnnnnnnnnnnnnnnnnnnnnnnnnnnnnnnnnnnnnnnnnnnnnnnnnnnnnnnnnnnnnnnnnnnnnnnnnnnnnnnnnnnnnnnnnnnnnnnnnnnnnnnnnnnnnnnnnnnnnnnnnnnnnnnnnnnnnnnnnnnnnnnnnnnnnnnnnnnnnnnnnnnnnnnnnnnnnnnnnnnnnnnnnnnnnnnnnnnnnnnnnnnnnnnnnnnnnnnnnnnnnnnnnnnnnnnnnnnnnnnnnnnnnnnnnnnnnnnnnnnnnnnnnnnnnnnnnnnnnnnnnnnnnnnnnnnnnnnnnnnnnnnnnnnnnnnnnnnnnnnnnnnnnnnnnnnnnnnnnnnnnnnnnnnnnnnnnnnnnnnnnnnnnnnnnnnnnnnnnnnnnnnnnnnnnnnnnnttttcagttaagatttaaaatgttaatgcttctatatattacagaaagaccttaagggaatttaaatttctttttaaaaccagttttcaaatgtttgtttttattaatgtttgtacttaaagagcttcaatttagaattatttctaagcaaagcctgacaatgtaaagttcttgttttatgaaagatgctgatctattttaagatgttacagttcatgtttttaaaaattaagtttaagatgttggtaacacacacctttaagtttaggacgttggtggcacacgcctttaatcccaatattcaggagtaagaggtagatagatctttatgagttcaaggcctgcctggtccggcagatcgaattccagaacaggctccaaagtcacagaaaaaccctgcctcagaaagaagttaagctactgtttaaggaatataaggtagctctatacagtgttaagttcagctgtgctgtttcaaactttttactaagttaaaaccagttacagtcagactaaaaattaattacagaaataagactttacctagccacctgtatgcttcttgtatgcgtaaggcaagtaactaaaacagacagacagacctctaatgcttcagagatcttcagaatatggcatttaaattgttatctttaaagtttataatgtcagacagactgccagatccggagagtgacccaaaggctccaaagattatgaggcaacccagtttctacacctggaccagtgagcgagatgctcagatgtgaaacctgccgcctgccagaacctggccaagaatgtggacaaagctgctgggcactggaaaattgattgtacccctttgcctagacaaaacaaggtcagtcttttccatggccctcttccacagagagaaaataaaacctctcacagataggcctggcgaagattgttgttctttgagacnnnnnnnnnnnnnnnnnngagaaacttgggtttggctaactgtatatggacttgcttctgactggcttctgtcacttttagtagattcggataaaatatacccttctcagatctctgaaatattactggttgtcagcttgacagcatcaggcagtcagatccactatagactagtcagtatgttagctgataaaatagtaactatctattgttcaggcacaagctcaaggtttttaagtttattttggttgtcatctaagtacaaacttaaagggcttttcatcaggccaaaggcacctctgtccaatccatacctggctctctggacagaagaaaaatatacatgcttatagcccaaatctgcagtttttgggggtctaacagtctaacttttgtcctatccatagtagttacatggtttgaaaatatatgtgtgtcccgtgaatatcagttgtctcacgtaagtttaagcatgctctgattatttgttaccaagttgtatctagtaactgcatactctgtattatccagcatttttgagtatataattatgttggcactagaagtatggcccgaattatcctaaagtaatgagaccaaaaaagtatttatagtaatattctgtgcgaagtgagggccatttggttcacagcatattctgcaaatcaagtttccacagtttttttgtacatagatttgtggtagaaacctgagtcctcagaaggccctggaaaagaagaaatgctgactcaggaatctactgcatggcagtaggagaaactgccccacagtgatagcaatgtggttcagtaagatcctcagatggcattttaaacaaatgctgttaattttgggctttattggttttatagttttcctttatttaatgcatacatttgttttagtttatagttgcataagactataagattggtagtttatactttatatttaaatgtatttaatgacattattgtcaatgtaagtcaactcaacactgggaggttgagacttctttctctttcaccacagtaaattacatattaagatgaaatagagacagtgtccaagagcaacatatttacttccaaaatcaaatatttcaagggtgtcaggaagcaggctccaaagctacaaatactccacgtgatttctgctgagcattggggtagctgcaagctccttcaaatgtgttttatgtaattacattagtgtcagtttttaatttatattgtatccccaagctaatatctcacataaaatgtaacattcatggtgctttaaatttagttgacatttttctttattaatgtgtcatacacaattctctactttagtttaacttggagatattaaatttgttgttcccttctaaaaaatgagatgagatatttcaaaatctgtgtatttgaagaaaaaaagaatcattttaattcttctataaattctatttttattattaacattatatttatcatatgtatatgagtgtttggaatgcatgcaccacttgtatagcctgtgcctttggaggtcagaaaagggtgtcagattccctggagctggatttattatagttacaatggtatttttacttttgagttcattataatgaaattattttttattaaaaatcacttgtaggatttctgggactcatacaatatttaaatgaacgatgttataagttgactgcagtaatatatccagtggtagtagaggtcagggtcagtgacagtagcagaagaagcatctttggttggtgactaattctcttactgtgttaagatttgttatgcttgtaatgacactgagtagataagaattgcattgttttgtctttgaagacaattggcttagtttctctcccatttctttgacaaaatacctgacaaacatcatcattttttgtacaaatggcttattcagacaaacctggaattataagaaacacagtgtattggtcttatagggaagagaagtctgtccttgcagaaaagtcaaagtggcaggaactagagacagctgatcatattatatccacagttaagaagcagagagcaaagaatcagataacttcattataaaatagttgaggggggcaaaggatataaatgtatgtatagcatgttttatctcactccctttttccctgctataaaaatcaatgcaactctctctctctctctctctctctctctctctctctctctctttctctctctctctcattttacctatttgaaatttgtataagtatagccaaaagaaataattgcatcaaatgtgttgaaaaataagaaaacacttaaaaatcattggtttataaattccataatgaaattttactatatgcaatgaaatcaaatcaaagatattaagtcatatttcaagcaccacacatgcacaggttatgacattatattgtaaattaaagaagcttttgattcagtgacatcagtggggcagcaaataacttgatagagaaataatatattttcatttatgctttgtaaatttaattaagtataaaaaggattagggaagaaccctaatactaatgaagaataacaatgagtgacatacaattatctttgctttaaaatgaaatcctatcccagagacatattttatgtcccaaattttacttttgtaaaaaaacatggttttttgaaaagaataaattttaataaaaaagggttatatttagagtagttctttatactagcctcttaaaatacttcagatttctttcaggtgttactcgtgcaagtaatttattatcaagggtaataattatgaagacaaacataaaaagaaaaatgagcagaaaaaagaatcttctacactatcttagcatgcatgtctgtcttcaggataaccaaaattgtgtgatcagatttaatctgtatcataaaagaagcctctcttcataaatttcatggatgccattactgtgatgttgtgaccctttcagaaactaccttatttttttaggaacacacatacatatatgaatatatattaacaatatatatgttcatatatacatgtattcttatatacatttgaaatgaagtatgtgcatgcctctctctatctctcactctctcggtatgtgttggtagttgataggcatgtgaaagggggaatggcagggattatggcagatattggtgacagtaagacatttcagtcttctgtacattgttattattagagaccgtgtgattctgaaactcatagaagccactttatgaccatgaattacctaaaatttaggggtcaaatcaaatttccaccttgccagaggccttagagaagaacctaatgttatcatttagataaattggtacaataacaaagtccctcctagatctcactttatatccttagtttagtgaacctcttaacactccttgaagatgcttcatttgctgtggatggtaataaatacagaagatcaggaagtggccaacacaaaaagaataaaaaactggacatctcagttcaaagttagacatcattatcacaactgactttcaggaatcatcttagaagaagtggagggaagatttaagaggcagaggtgctacacatttgtagcaaaacagtatttgtactgcatacaaaagactcacacatgataaaaacaacaataatctcaacatgggcagagggagggctcatgaagccccacacacatctgaggagatattggctatatattgctgttgggggaggaaaattcaaatggcaccagtgatgtagttgcagagaagcaacatttactattgcagaagctattacatccatgcacagacaagtacaactaagtggactcagtaggtctcaaaaaaagaacatgcaattgagagggaaaagtggtggtaaagcagtagaagaactggagtggaagagatagggactggatttcatcaacaaccttttatgtatagatgagactctgaaacaaacaaaaaataaaagaaagaaataagtttattcaacagctctaatgtttggaaccagacacagtgctaattggactgtgctgatcaattcatgctcttgccatttcactaaaaccaatgctaatattgcataagcccccagaatataaatgcagaagcatctagaaatgaaaatgtccttttcttagcaaaagcaaggaatgcttgtattttgtcttacaacataaatgtttcttgatatgaaaaatgaaggatggatgtgctcaaccctgttataattatgaaggcatccacagaaagctacaacatgcaggaacaggaacatgccaagctctgtggctagtgacagaaggcaacgccccaccccagccccaaatttccaagactggtaatgaaagaacagattgatagctataagaaatgttgtggtttagtttctgttgttgcaaagtataaatatatacatttattaataggacattgcagggagtcaaaagggagaaagaaggatgaagaagaaagacaattcaaaatgagatagatcttaaacttacagaaagcctagatctggtgccatgtttgttgtgcaaaaaatgagatcacttccatacaataaagcccttcagttcaggtttttaattcaatattaatttgaaggactgagaatatagttaatataagctaacaaaacagggaggggaattttaacctacaatacttaggtagcaagataggacattatagagattaaaaataatagacaagagagaagcattttgggtctgttttgtttttagaaagggaagggctaatctctaatcaatgattacaataaggtcaattagaaagaaaatgctaagacatgcctttattctagtcagttttgtaccactaaaggatttttctgttctctatagctgtttcagaacacagtcaatgaatagaatgctttgtagttgaaataaagggtgaaatattgtatagcaatatttgaatgaggaaggagttgtaacataaaaggaggcattgggtgtcaagataacttcaaagtgtgtcaagtctaaattaaagagttaggatagaaacaaagattaactactccactacctccaccaaaagcattatagatgaatcatttcatgtctttgttggcaccagtcatgtcagaagcaagaaaatgaattcatatatttcttttcagtgatggatccattatgtatttcccaccttagatcaaagatgcccagaaatattttggagtgctgaataaatgatctgttgtttccctggcctgtaggggcataacaaatgtactatacccaaaacactggtgacaacaaattcagttctgacctgcactggctctaacaccaacttgctttgttttaaagcttgcaaagtgaagctgtctcaggtcagttctgtgggaggagggatggtgtgtatgtgtgcttctgcttgggaaaacacattggccaacaggtgctgggtattgaacccatgtcctctcaagacgagcaagtacttataaccactgagccatctttccagctcatttatcatgctttaaagggagataggaaaacacatagattctatgaagattgatcacaaaaatatattttaatataatatcctaactgttggaagctgagaaagtactgaacaaaaggtttgactgaaggcaggattaatggatatgattttgtctaagtatgtgactgatttagccactaagtaagcacctgagtgaagagatggctaaggagtgagttctaagagttaatagaatgtgttgtgttattcttcttcctttcatttgcttttgtgtgacaccatttttaaaacatcaaccatctgacctgaaaatgaggaaactcagactttatataatttaacaagtaaatgcaaacatcaaatcctgaagaatggcagtaagaaaggataggcttcctagaattcaatgaaaataactgaacaaaatacctgaacttatgagcttatgggacacaatgtatatattactatggggaaagttcttagcattaagtgcttaccttaaaaaattggagagatctcattgtagcaacttagtagcacacctgaaaactctagaacaaaaagaagttcactcaagaggagaagagagcaggaaataaactgagggacgaaatcaataaaatagaaacaaagaggataataaaacaatcaaatgaaacaaaaatatacaaatatatacaaatgaaacaaggagatttgtctgagaaaatcaacaaaataggaaaaaacctgtatccaaaataactaaaagatgcagagagaatatctaaattaataccatcagaagtgaagggggttatagcaacagatcctgataatcattaagtcatacgttagaagcctgtacttcacaaaattggaaaaccaaaaaaaaaaaattctaattgcctcaaaagttaacacttatcaaagttaaatcaagatcagataaacaatttaaatagactcataaacactgcagaaatgtgcacattcattaaaagtctcccaaccaaaaaagcccagggtaacatggatttcatacagaattacaccatactttcaaagaagagttaatgctaatccacctcaaattattccacaaattataaacagaaggaacattgtcaaattacctttatgaggtcatggtcaccctgatatccaaaacacacaaagatttaacaaagaaagagaattacggaacaattttccttatgaatacagaggcaaaaatactcaataaattatttgcaaactaaactgaagaatacatcaaaaaagataatttaccatgaacaagtaggcttcatccaagagacgcagggatggttcaaaacaagaaaatttgtcaatgtaatcatagaaatgaaatcaaagaaaaaataaaacaaaacataagatcatctcactagatcctgagaaagccttcagtataatccaacaccatttcatgataaaaagtcttggaaagatgagagacaaaagacatttaactaaaaatattataagcaatacacattaaccatacagccaacatcaaattaagtggagaggaattcaaagcagttctattaaaatcagggacaagacaagcctgtactttctccctatatctattcaatgtagtgcctgaagtttcagctagagcaataagacaactaaaggagatcaaggaattacaaatcagaaaggaagaagtgaaagtatccttatttgcagataatatgataatatacataagtgaccaaaaaaattttatcatgaattactatagcagatatacacattcagtaaagtgactggatacaaaacaaaacaaagaaaaacccaatagccttcctatatacaaatgaaaaatcaactgagaaagaagtcaggaaaacaacaccctttagccacaaatgacataaagtatcatggagtaactctaaccaagcaagtgaaagacttgtgtgataaaaactgtaactctttgaagaaatttaagaagatatcagaagaaggaaagatcttccatgctcatgggttggtagaatcaacatagtaaaaatgtaatgaaattttgtttatgttgtaacaaataaagcttgcctgaaagtaagaatgcaaatctagccacacctgttagccatagaggccagacagtggtggtacacacctttaattccagcacgtgggaaacagaggcatatggatctttattagttcatggccaccttgggctacaggagattaaatctgtctgaaaacgaaacagagctcacacaaaattgatcccagaactggggatctgatgcctttaataccagcactaaagtggagacagagttatatggctgggcaaagagaggaatataaggcaggaggagacaggagctcaatgcaatctgaggaacagagcagtctaagaagtctaaggatgcagtctgaggacaggatcacctctttggtctgagcattggtagaggtgaaatctctagttgctgacctctctgcttctcttaacttcagcatcagcatcaaccccaatatctggttctgaattttaattattaagacatattataattcatgctacataaaaatggctatgctacaaaagcaatctgtagattcagtgcaatccctgtcagaatgcctacacagttttactgatctttaaagacaatactcaacttcatatggaaaacaaaaccaaggttagctaaaataagagtgtacaataaaagaacttctggaggcatcaccatccctgatttcaagctctactaaagagctagagtaataaaaactgcacgatattggcataaacacaaacacactgaacaatgtaattgaattaaagaccaagatataaatacacacacctatgaacaccttattatttataaagaagccagaaatactcaactgaaagaaaaggaaagtctcttcaacaaatggtgttgtacaaactggatataagcatgtagaaggatgcaaatagaccaatacttgttaccctgcacaaaatcaagtccaagtagatcaaagacttcaatataaatccagaaagaatgagcctgataaatgacaaagtggggattggccttgaacacattagcactggagaggactttctgaacagaataccagtagcacaggcactaaaatcaacaactaatgaatggaacctcatgaaactttaaagcaaacgacactgtcaataggacaaaacagcaggccacagaatgggagaagaccttcaccaactctaaaattgataaaggactaatatctaaaatatacacagaacttaaaaaattaggcctcaacaacccaaatagttcaattaaaatttgcatacgtagggcctagttcaatcttaggctgggtggcttgggtagtttatggggccactagctgggaaatcagtatttatccctaatgcatgaacttgtgttttggagcccattccctatggaaggataccttgctcagcctagatacagcagtgagggtcttggtcctgcctcaactgatgtgacagattttgttgatttccccatggaaggtctcaccctctcagggcagtgtgtaggaagtggagtggggagaaggtccagggagcaggaagacaggaggaagaaggaacactaggattggtatgtaaggtaagattgttttaaaaataaaacaaaaggaataatggggtacagatgtacacatagaattcacaatggaggaatttcaaattgctgagaaatagttaaagtaatgttcagagcctgcatgggtctatgttaggacctctgcatatatgttagcctagtatttttgtggggctactagcattgggaataggggtatctttgactctttcttctgctattattagtctttttcctcctactgggttgcttggctcatcattgatactatggtttatgccaagtcttattataacttgttatgctgtgttcagtggatatccctgaaaatcctgctcttttctcaagggaaactgaggaagagtgtccctgggggagaggggtggtgggtaactgggaggatgtgtgaatatgtgggactggggggagtggagagaggggaagctacaatcaggatttgtagaaaacaaaacaaaaaaccaaaaatattataaaataaaaatataaaaataagatattgcactttagtaccatatgatgaaaaaattaaacattttgaaattttctcatcactttcagaagtacttatatcaatgacacatttagaaccattgcaaatgccatgaaatataatgcaggataaaaattaatgagataagatgcctgtggtttcaaatgtggcaaacaaagtttcacattcagtgaaatgctctcttttggaagtggagtcataattggattaataaagaaataaagtcaaggtaaaatatctggaacctttttttagtatggctatccatgagtggcaaagcaaaagaggaaggaaaaaggggccagaaacagggatcaagagaaataaagaataatggcaagatatggggttggtctaaaacttgttttacatttgttcagcattttacaatttacatttacatttgttcagcattgccttgaaaatttaagtactttacatagcacttcattttaaaattggtagctgttaatctcagcactcacttgggaggcagatggatatctttgagtttgaggccagtctggttaaaaaaccagttccaggacaactacagttggtatatagagaaatcctgtctcaaaaaaccaaaagaaaaattaatgaaaacaaagcttttaaggacaatgtgtagggcaatctggcttgctagactattttaatggcacacttctagatcagaagagaattcctacctcaaagactaaagttgaggagagccattgaagaagacactgaagtcaatttctgtcctccctgggcagatatgctcaggtgtacccacactttcccaggcttccctccatctctctttctttctaactctgtctctctctggcagacaccacatactcatgagaaaaaaataaagaaacaaacaaaaaacaatcttcaccaatagacatatgtctaatccagaagaaagaattctaaaacctagtacttatttcaaaatatattcatatggttgatttcctataaaaagacattatactgacctaacacattaatgaggcaatccaagagataaaagtgagtttttcttaagagactaacctaccattcattaacttcccaggaagttaacatatggtaacagccatcttgctttcctctcacttcccaggaagcttcccacccaaccctgagtagaaggtcgtcaacctcccagtcactttaatcatttcctttcccagccatcagcttccaagaatttataatgtctaggaaccccagagctcactaagtctaaagacatgagcatgtctgtctccaaatgctgtgcaaagaaaatcagggaacccaatcattgaatttcttttataaagtaatcgaaatgctgtttttcatgtgtgttagttgagttctgagtgcacatgtcagcatcagggggtgtaggttggagtcacaactcagacttctgtctgcagtagactgagttttttgagatggttccacttgtgtgaaatgtttgatctcactacacacacacacacacacacacacacacacacacacacacacacacatatacacctcaccatgtgcctgcatgagcaagtattgagatgatcctgccagccagcttattcagcttactcttcttggacctgggactagggctgcatgttcttttttttctcttcctccccttttttttattattatttcaagttagggaacaggcttgtttcacatgcaagtcccttctccctcttcctcccctcatccccatccctcctccccacctccaacctatcccccacctccaacctaccctccaccctatccacccaccactccccaggcagggtagggcccccaacaggggctccgcaaagtccaccaaatcttcctgtgctgggcctaggcccctccccatgtgtccagagacagagtgcatcccttcacgtgggatgggctctcaaagtcgacccacacacaccagggaaaaaccaccagtccacctccagaggctccccggagtgcaggggcctccccattggcatccatgatcagggcgctggatcagtcctgcactagcctctcagacagcatctggggtcgatatgtatagtgggaaattaccaatacagagtcaggtagaaatataagggtatttaatagggaaaagccttacttacagagcaacctagccagccggcgtggtagtagtctgtacatcaagaagcaaagagaaacaaaaagcgcaaacgcagtcacactacgtcactctgaccacaccctcacaagcatggtcaggcccacctgtagccagcccctaagaaggcatggctacagcttcccctacaattccccttttagtctaaaagaggattaaaacttaacagtataaagtatccaaaattagcaatcataaaagtacaacaatctgtttatttcacatcctaactataactaaaccctaaagtcatctgaaagaggtttccaagcctgaacacctcggttcaatcccaaccaaaaacaataggaagcaatccctaactaggtatatacactatcctaaatgacaacaatggggaaagggggcatagcattctgcaagttactagtacaacaatctgtttatttcacatcctaactataactaaaccctaaagtcatctgaaagaggtttccaagcctgaacacctcggttcaatcccaaccaaaaacaataggaagcaatccctaactaggtatatacactatcctaaatgacaacaatggggaaagggggcatagcattctgcaagttacttcctgctgaaatgggacgatgatagtcatgtgcagtcctgtaggaagaaaatgttagtatccagtccatgttagatgggattcacttgattgaagatctcgcttgaaatcctcaacttgattgaagtcagtacccgaacctctggccggagtgtcagttgaaatggagcaagttggatctagtgcagtcgaggaggtgtagcctattttctttccagggtgtccagggattgctgttatgctttccctttttcaggccaactgtttctgtgggtttctctaacctggtacagaccccttcaatcttcattcctccctatcttcaactaggttccagatttcagctctgtgtatttctgtggatgtctgtctctgcttccatcagccactggatgagggctctaggatagcatannnnnnnnnnnnnnnnnnnnnnnnnnnnnnnnnnnnnnnnnnnnnnnnnnnnnnnnnnnnnnnnnnnnnnnnnnnnnnnnnnnnnnnnnnnnnnnnnnnnnnnnnnnnnnnnnnnnnnnnnnnnnnnnnnnnnnnnnnnnnnnnnnnnnnnnnnnntatctcgtatcctgctctctctcctctatttttcaccctactcaatatctctactcctccatttcctctcctcctcttctcattctcttattgtggcagcaccctctcccctaccctcatgctttcaattagctctggagttcatgccacttcccattcctggggtctatttagcccttagaatccttcatgattcctagtttctttggtgaagagattataggctggtaaacctttgctctatgtctaaaaatcatatatgagtgagtacataccatgtttgtctcttttgtgattgggttacctcactcaggatggtttcttctagttccatccatttgcctgtgaatttcaagattccattgcttttttctgctgagtagtactccgttgtataaatgnnnnnnnnnnnnnnnnnnnnnnnnnnnnnnnnnnnnnnnnnnnnnnctgcaccctactttttaatttcattgtttggtgttttggtggctaccttcttgagctcgtgcatggtgacaggtatggatcaatctgcaattttctgcatgtccgaatccaattgtgccagcaccatttgttgaagatgctatctttttccactgtatagattttgcacctttgtcaaaaataaggtgttcgtaggtgtatgggttaagatctgggtcttcaattcgattccattggtctatatgtctattcttgtgccaataccaagcttttttcagaactatggctctatagtagagcttgaaatcagggatggtgatgacaccagatcttttattgtaaagagttgttttggctatcctggttttttatttttgcatataaagttgagtattgttctttcaatgtctgtgaaaaactgtgttgggtttttgatggggattgcattgaatctgtagattgcttttggtaggattgccatttttactatgttgattctacctatccaagagcatgggagatctttccattttctggtatcttctttaatttctttctttaaagtctcaaagttcttattgtacaggtctttcccttttttggttagtgttaccccaagatattttatgttgcttgtggattttgtgaaaggtaatgtttccatgatttcttcctcattgggttgatcatctgtatacagtagggctacagatttcttttgtgttaattttgtatcctgccacctggctgaaggtgttaatcagctgtaagagtttcctggtaaagtttttcgggtcactaatgtagactatcatgtcatctgcaaatagtgaaagtttgacttcttcctttccaatttgtatccctttgatccccttttcttgtcttattgctctagctagaacttcaagtacaatattgaagaggtatggagagcgtggacatccttgttttgttcctgattttagaggaaaagcttgagtttctctccatttagtttgatgttggctattggtttggtgtatatcgcgtttatcatgtttagatatgttcctgttattcctgttctctccaagatctttatcatgaagggatgttggattttgtcaaaggctttttcagcatctagtgagatgatcatgtggtttttctttttcagtttgtttatatggtggattacattgatgcctttaggagtttcctggtagagttcttcgggtcacttatgtagactatcatgtcatctgcaaacagtgaaagcttgacttcttcctttccaatttgtagtcccttgatctccttttgttgtcttattgctgctctagctagaacttcaaggccgatatnnnnnnnnnnnnnnnnnnnnnnnnnnnnnnnnnnnnnnnnnnnnnnnnnnnnnnnnnnnnnnnnnnnnnnnnnnnnnnnnnnnnnnnnnnnnnnnnnnnnnnnnnnnnnnnnnnnnnnnnnnnnnnnnnnnnnnnnnnnnnnnnnnnnnnnnnnnnnnnnnnnnnnnnnnnnnnnnnnnnnnnnnnnnnnnnnnnnnnnnnnnnnnnnnnnnnnnnnnnnnnnnnnnnnnnnnnnnnnnnnnnnnnnnnnnnnnnnnnnnnnnnnnnnnnnnnnnnnnnnnnnnnnnnnnnnnnnnnnnnnnnnnnnnnnnnnnnnnnnnttctctggatttccacagtgtctgttgttatatcccccttttcgtttctgattttgttaattagtgtgctctctctctgccttttggttagtttggctagaggtttgtctatcttgttgatcttctcaaagaaccaactctttgtttcattgattctttgtactgttttcctagtttctactttattgatttcaactctcaggttgattatttcctgggtctactcctccttggtgagtttgcatcattttgctttagtgctttcagttgttctgtcaattctctaatgtgacttttctccagtttcttcatgtgggcacttagtgctatgaacttccctcttagcactgctttcagagtgtcccataagtttgggtatgttgtgtctgcattctcattagattctaggaagtctttaatttgtttttttatttcttcctcaacccaggaatggtgcaattgggtgttattcattttccaagagtttgcaggttttttgccatttgtattgttgctgaattgtagctttaatgcatggtggtctgataagatacaggggtttatttctattcttttgtaactatggaggtttgctttgttgcctactatgtggtcaagtttagagaaggtgccatgtggggttgagaagaaggtatattctttttgagtttgaatggaattgtctatagatatccgttaacccctgttgggtcataacttggttctgacagtccttaatctctcttttcagcaggattccccacttttagctagatgtttggctgtgggtctcttcatctgtttccatcagttactagttgaaggttctctgaaaacttaattgacaatggattgatctattttctttattatgttaaataataaagtctgaaatttcaatatatgttctggaaaacagctgaagaatagatctccctaagccatggtagctcacagtcctaccaccagaacacatacttcttcaagtagatcatgcctcttggaggagaaaccaatctaatttaattgctttcagatagttgagttttttaggtcttccagagttgtgcatatgtatttgtgcataatggggagggtgttcttactagagcgcacatgtgaaaatgagggggaaaacttgagtgaacctgtttttctccttcccacatgtgggtcctgaagattgaattcagctcatcagactcagcttggtagacacagtcttaactatctgagccatgtctctccccgactccctaaaacaatactactcagtgtgttgatttgctgagttcattgtgaacaacaaattcattttactatgttgaagtccttctaaagcctcatacaaactgtaatgcttgcttactatgtttagaactctgaaaccaaattttgtcccagcaagttttttattaaacttctcaaatatttgagtgttcaagtgacaatgaagtgaaaatataaatcatcttctggcacatgctctttattaactgctacagaatccagtggagagattgacatttcccctagtccctgtcttacatatgcttccattagactaaattccaggttgcatagaatctattactcatgccccagttgatttcttgaatcataaagcagtataatatttggatgccttaattagatgctctcacttactggaagaacaattttagtgcttaaaattagaaacacaacatatagactagaatggatgaatggggaatttgttctttacctgttttgaaatgaaaggaagaacagaatataaaaagatcagcaatactatttcagcccagatacacagaggagggcataggccctccccaaaaagatgtgacagactttgatgattccccatggaagacctcaccgtctttgggcagcaggtggggaggggtcagtggtattaatagggggcattggaagatgggagggagaaggaacgggggattgctatgtaaaattattgtttctttaaaaaaaaagagcgacaaagtgttcccatgaaaattatgttaactctctcgtgtttgctggtattttctgatttataaagtctacaagttttattctaaactgtagagtcaataaatattattagttaaataactgtcttttatatattatatcattacttaaaagcatttaaaaacagctattaatgtgaatccttttcgtatatgcctaagagtggaattgctggatctcaaggtagactgattcccaatttcctgaggaactgccatagtgattttcaaactggctgtgcaagtttgcactcccactggaagtataggagtgttctcctttctccacatcctctcgagaataaactgtcattggtgtttttaacaccaatacaaaatggcatctcagagttgttttgatttgcatttccctgatagttaaagatgttgaacactttcttaagtgtctttcagccattttggattcctttattgagaattctatatttagttctgtaccttattttttaattgggttgtttagtggtttggtgactattgtcttgagttttttgtatagtttggaaatagccctctgtcagttgtggggctggtgaacatcttttcccattctgtgtgctgctgctttgttttgttgactatgtcctttgccttacagaagcttctcagtttcaggagggacaactgttcaactatgttcacagcagcattatttgtaatagccagaacctagaagcaacctagatgcccctcaactgaagaatggataaagaaaatgtggtacaattacacaatggggtactactcagcatgggggggggtggaatttgaaatttgtaggcaaatggatggaactagaagaaaccatcctgagtgaggtaacccattcacaaaaagacaaacatggtatgtattcattcatgtatggatattagacttagagcaaaggatttacagcctacaattcacacctacagaaaagctaggaaacaaagaggaccataagaggggcatacaagttcccccagagaagtggaaagagataagatctcctgagaaaattgggagcatagggggaggaaggtaggaaaaagaggcaggtagaaggggacgggggaggaagacataagggaccaagaagattgatttgggtgaagaaaagggaagagcacaaaaagagataccataatagacggagtcattacaggtttaaagataaatatggcactagagaaatgtccagagatatagtatgatgaccccaataaagaacctaagcaatagtgtaaaggctaccttaaatgcccttcccctataatgggattgattgctaccttatatggcagcatagagccttcatccagtagctgatggaaagagaagcagagactcacagcaaatcaatgaaccaaattcctggaattcagctgtagagagggaggagtgatgagaaaaggggtcaagactatgctggggagaccaacagaaatagcagacttgaacatgggggagctcatggtcctcagcctgacagcttgaaaaccagtacagaagagacacaggcccccctgcatgtgggtgtcagttaggagacctgggcagtctatggggccacacttaatggaatagcatttatagctagtgtattaattgactttgggaggccattctccacagagggatactgtctcagtctagacacatgggggtgggcctaggccctgcactgaattacatgacagactttgatgatcctccacaaaagacctcaccctttctatggagcagaagagggatgggatgggggccctgtggagccatagaggaattggagggagagagaatttggattggtatataaaacaagattgtttctaatttaaataaaaagggaaaaaactaaaaacagttattaaaagaatcatacaattagtttaatgattgaatgttaggcattccagtagtttggaagaatcaatattttcaatttgtttaaatatttttctctaaaatagcaggatacaaattcttattcccattaatattgataattatcaatgtatactgagtagttatattacaaggtatatgtttctttgattttcttaactcgaattaactaatatcaaccaattagcagcttactacagatggaaaacaaattaaaataaaatagaataaattgtgcagctatttttgaaaactatgtgtctctgtgtgtgcctaagtatatgtctgtgtaccatgcttgttcaggaacactcaaagcaaagactaggcacaagatttctgaaaattgagtcacaggagactgtgagcttccatgtgcatgctgagaaccaaacctagaacctcttcatgctcagccagtgctcttaaatactaagtcaactgatctccagtccatcttagatttcttttgccttcgtttctgtttgcattgttgtggatcaaacttcgggcttgcacatactggatagttgttctatgagtaacctacactctcaggccttaatgacttgattagatgatatttaatagattcccagttctttagtgaagtctcagaatataaaccatgaaacaggatcatctacagaaacagtttgttgagagtgaagcaaatgaagtatatgcttgtctttacaatatttattttcaatttaaatggataatttaacctgtcttcttgtatattatatttataaatgagaaaagaggaggcttgatgaggtatgggtgttggtaatgggtatacattgattccatgtatgtagcattcatttttcaaaacatgagatatctaggaatgtgcacaactctactatttatacacagagtttctgctatgactatggagtcatagcaaataatttccctgagttatttcctctgtccatatatctaaatatcttgcatcttgtaaatacacaccacagtcattctagtaccaaatttgaaaaacaaaaaagaataaatgctgaatttttctctttatcacttttatctttccttttggggtatgaaagctttacttaggagaagagaaaaataaaacattctgcctaatgccttagaacttataaaaagaagctaaagtcatttaaaaccctattatatatccatagaacacaacttagtgatgtatttaacgaggagatgatttgggtgtaaagtatatgcagctgagaaattctcctgcccaatgactcactagttacaaaggaaagtatcaaatgtgaatggcagtggcaatagtttttgtcacaagatgtcatttgtatgtcaagatctcaagggatgtgcatattttatttaaatctaaaagggatttaaataaatcagggggacagccacagcattatgttccagaatgtatgtgtgtggggtaaaaaatatcaactacctatttcttggctatcaaacctttattgtaatgcacggatgtgtacatgtatgtgagattgttttatgtagatctgttcctatgtgtcactactggtgcatgtgtgatacatgtgtggaggtcagaggacagccctgggatgttggtctttgccacaaactgtgtttgacatggtgcctttttattccatgttgtatattctgaaaacctgagctatgagcttcaggagtctctggtctctgcctgtcatcttactatagaagtggatggtactttatatgttttcgaggactctgaactcaatccatcacgtgctttgccctttccagagatccatacttggtgctctaaggatgaataaaaagcagctaatgtgtctggagagaaaggcacctgataagaagtgtgaagagagtgagataaggaacaactttggagcctgaacacacagccataaaaaccaccagaactttatttttcctttgattgaggttcaaagccaaatgaagtcctgaactgaagctttgagaagtgaagttaagtgctaggaaattatttttattactacacactgaagagttgatggagttaaagcacataggcagtatactgagcagagttaagtggaagagattagacctaagatatgttttggtatgctgatatagggctggcacagatagtattctcaatggggcagatgtactccatcaacaactggtggggccttctttccttagctgatccagcataacagagactacctgctttctatgcttcttggttttctagaatgtttgcatatatgactttgaacttaagttttggtatttaagtattttggttaaaataattcttaaacactgtatgagtcaccagaactgaatcataaaaatctataaatctttgtgtataggattaagcaatagagcttcttgacatctcttgggcagtgagtgtagaattaccaacattagaaactgtgtcctgtgaattccaaaatctgtgggtcaggggtgtaaggaagtatcagcagatggtggaaaaatgtccacaacctggggagagtggaaagtcataagatgtcagccaggttgttgaatcataaaaagataccaagtctaattccattggtattcaaatcagtagcagtttaaatgaaagagtagagaatatgttggtcagatgtagctaactggcttagataggcgtaaactgggtgggggcatcaatgaatttagtaaattggaagtcattggtaaaataagaatgaattacaatgtgttaagtcagacttgattatgatcagaataaagggatgaagagagagtgtacacaggatgcttccactatcagctaaaacaaactaactgaatgataattagctagaatctagggtgacatgcaatatcatacatgtcacagatatgtgcttgtatcttaataagaggctaaaatgttacaaagaaatagatggaagatatgtagtatctatattttctactagatcctaaaattttcactagaattctatatgtgttgctattcaaaacttttatattacagatctatagcatggtaatgcatcattaaatatttgctgtatcaaagaaaaccacattgggcttatttagattttgtccaatcattcctcctgtgtcctattttttagggcatggtctcctaaagttgactttaggagaacccaacatatttttacactaggttccttgatctgctttggggtaagtttaaagaaaataggaaagggaacaaattaaaaaccaaaccaaaccatacaaacaaataaacaaaaagaaaaccctgaatccttccacaaacaatttcacagaatcctagtgagataaaactttctgcatgctctgacatatatccaaacctcggggactgtctttcctctcccctcattatgttattagaaaatacagtggttgtaattgttagcagcagttggtaaacaattttaaaactgagcctgagggaactaaaattgaagagctaagaaaatgtgatcgaattagaaagagcatggctagacattaacatttgcagagatgaaatgttttctttgtagttagaagagagttgtctggcctgagtatgtcattctttactgaatgtggataatgggaatctgtatttcaaactacagattgtcagttttgcgatatgcacctgatgaaaaaaaaaatggatgaatgaacaaatccattgatctaaatacattgtgatatatttccatatggaactgaagaacaaacatttttcaaagtgagatcataaaggagacatttgagttcacaaaccccaacattaaagtgctctgaaaatgagttatgtttgaaaatgttaattgtatctaacaaatttatgttttccacactgcagttcagacagtgtcatcatatgtagcttcattctttggaactctggattctgtaaggctgtattcttaagattttatctgaattaattgctgtacttgacatttggatatcgaacacagagaggacatttaaagaaaataataaggaaaaaagaacatacatttcacaaacaaggaaaagagatctggggaatatggtcaagctctcttgattttagagagtctagtgagagttgtgtatatacccttcaaacttacaatattaaaataattattcccccgtgggaggactcagcttccctgagaagtggatgggggttgggtgagagccatgggaggttgggagggagagggaactgggattggtatatgaaataatttttaatgcaaataaaattttatttaaaaaatagcagaatgatgggccattaagatggctcagcaaatagaggcatcagcagctatgtctgtgaaactgaacttgaaccaaaagtctcattcttccaagccattctcagatctcatatgtgtccttttcatgtgcaagcacatatgcaaatatttctatattaaaataattgggataccacttacactaatgtctgaggtagaaagaataaaacaattttccttctttgccctgatactaatgttcatttaaagtaaatatgattgttctagaatgacttcatttaagaccttaagaacatctttgaaagaaacactatcagtaaagcttgaattcttcatgaactatgtgggctcttactggcttaatggaacaggacataaagatgttcatgtctacagatactgtgacattagtttaagccaaacaaaaatcaaatataattgatataaaaagaactattctgtcctgtattgaatatgcccagcatattttcttaccattattccataaatagttactgaaaactatatttcttcagcatctatattgtataaggcatcatacaatatctacaaatgttagatataaaggcacacatacatagaccaaatgtcaaaaactacatcattttatagaacagatttcactacctgtcaattttggcatatgtatataccatgcaaccaacactctggatttcactaaatatacacagtgttgcaaactttcctgtgtagaaagtaatcatattaacctagttggaagatctagttgtcctgataagaactctgttcctactaaagggaaatgactttcaaagctcattgaagttgtgaggaaacagaaactcattcttcgttaactgcaaaacattatgatggttctaggattctctatgtaagcaatagcactcactttgttcctacttcaaatgtaagtgatggacaagtttttcccatgttaactcttctacttataaagttgtatataaagaggggagaggaagctacaagagtgagaagggaagaaaaggaaggatgcagaggtcatcaggaagcagaaaggttgactcaggtgtagattagaagaaaggacatatgctaggtaggattttagttggggggtggtagaggagaaagggagggagacgggaactgagatcatcatgtaattcaatcttgtttgtaattcaaatatataaaaaataataaactaaaaaacatgctattttggaccagttcctaaaatttgtttctataactttaaaaataaaccactttcactttactcttgtatattcctcatgtcagctcctggatttttatatataaaactttaggctttgcattatattctttctgggcgcaatgcttgttttgattaggcatctggtttagtaagaagatagaatatagtttaatggtcctataatggattaagatttcttgtacaaggagtcaagaccatgctggggaaacccacagacacagcagacctgagcaagtgggagcacatggacacaagtcttacagctggggaaccaacataggactgaaccagcgcccctgaacatgggtgtcagctaggaagcctgggtagtctacagggcttctctcagtggaaccagtatttatcttagtccatgaatagacttcgggagtccattcctcatggagggacactatcttagcctagatacatgggggacggcctaagccctgccctaaatgatgaggtaacagaatttgatgatccctcattgaagggttcaccctccctggagagtagatgggggatgggatggggagttattggggggggatgggagaatgggagggacagggaacttggattttttctattttaaaagatttcttgtatacaatggagaatattttcagtgatatgtatttcacagagaaagctccaaataaaaacttctttcactattgaaagatgtgtgtaaagctagtgaacaattggacaaaaatgacacatacaccacacacacacacacacacacacacacacacatgcacacacacacacacacacacacacacacacatgcacacacacacacacaacacacacacacacacacacacacaatgctgtatttgaacattggcttgttgtcttttgctcaaatattatggtttccaattgtgtgttcatgttgagttttgggggatttctgtttgagtttggggggatttttttttttttttggtttgttgttcttgtttgcttgtttttttgttaaaagaaaagaaagaacagacatggagttggatgggtgagtatgtggagaggagtatgtggagagtatgtggcaggagttggggagggaaaagcataatcagaatatattgtgtgaaatgaaaaacatgcaaacaaacaaacaaacaaatcacccttgtgcttagttacaaagttaggaatttttcacaggaaaggatatttacattttggctaccacacaagagaagccaatattctattggcagtgctaatttgcagttgtccttttatgctcttaatacatttatgctcagctactttcaaagactcacacaacaatttgggttctgtgtcatcctcatccaataaaacaaagggaatgctctgtctcaatgaaatgtcaagcaaatgtatagcacaatttgctgagacagatggagaaaataatttcattttgtttatgacatccattaaatttctttaaaatggatgtttgtccagtaagaaactcaaattagctgggctatatatctgacttgagtaacaggtttattaaggcaaaaatgaaactgaagggcccattccatccaagatgacaaaggaacagaaagctaaaatgtttccataccaaactacaaataaagaagagcaaaactgaaagaactgaactcaaatctaacaatcatgagctacattaatatatttcctgcatggattgtgcagaaatttcaaaatcatctatctgggcacaacacctgctcacaggccagtgtctgaagtaagttgaacacatctgtggggattttagatgaaatgaaggctgtctcaatataagaaacaagtgaccttcaggaaatagtctcctgtgccaattcattcaagggtacttcccattttctcttctaagaggttcagtgtggctggatttatgttgaggtctttgatccatttggacttaagttttgtgcatggtgatagatatggatctatctgcagtcttctacatgtcagtatccagttatgccagcacaatttgttgaagatgctttcttttttccattgtataattttagcttctttgtcaaaaatcaggtgttcatagatgtgtgaattaatatcaggatcttcaattcaattcctttgctctacctgtttgtttttgtgccaatacaagttgttttcactactatagctctgtagtagagtttgaggtcagggatggtgatgtctcctgaagttactttattgtgcaggattgcattgactatcatgggtaatttttgttttcaatataaagttaagtattttctcaaggtctgtgaagaattgtgttgggattttgatgggggttgcattgaatctgtaaattgcttttggtgagactgccattttgttatgttgatcctacctatataagaccaggggagatctttccattttctgatatcttctttaatttttttctttaaagtcttaaagttcttgtcatacaagtctttcactgcttcggttagagttccccaagatatttttatcttgtgtgttgctattatgaagggtgaagtttctctgatttctttctcagaccatttatcatctataaataggagggatactgactcttttttagttaatcttgtgtcctatttggtctaggaattatagatttgtaaagatgtattctccagctagtattcctttgtgaatttagagaaacactgttttgaattcataaaataggcattttctttttgtctctgaatgccttatcctaaacaccctgctaagttataaaaataatcacaaatttacttgagaagtgttcacaaggaagagggtcttatgtatattacttgtaattcaagaagttcaataaatacccttcttgacaataccagatacagttacatactgcaggaggttgcttattttgttggattgctatgaacaaagtgtattcatgttttaaagtgtttttgatgtccagttcttagtaataataatatccaataggaaatggcaagtaccacttatgcattaattttgggaatttaaagatggcatgatcatgtattattcctggcatctattgacctgaggatagcatggatgagatgttcaggaattttcctcctattatttcttccagaaagaggaattctcagagtttaatgtttaaaagttaaaaatacattatttgttgaaattattttacatctcttgaaatattattgtttttcaacaattcatgaaagtatcttttatatctctataaaatataatgatcaagtgttataacctttacacttaaatttaattcaatgtatctatattctaaggtaaagaataatgaatttgatatatttgagaacgaaaacatgggcatttgatacatggctatggctttctggaaggatcaatgcaattcctttttatattgatgatgatgttgagacaaggtgctttaactatttctctttaaccctcgacttatggtgagtaatcatggtgttattcacatacatctttctggggagtcaagagtgggataccagcatatgaataaagaagtagggaatgaagacttctcagcatcctggggagcttttccattggttaagtcatcaatggatgaatcctcactagttttaataaattctaagcatggaggctacccatggattaatcatgattctaagattaattcttagttcaatatttggcaaattaagaatttgaacatgataagaataatatgtaaacatcatgttaattcaaattgagtctttcttttttttttccagatgagacaatgcaagtattaacaggcaagatgagttttcctaaagaaattgttagaattggctttgctggattctgagaatgctttatcttcaagaaactgttggtcatttcatcagctttctgacctagctcagtggtagtgtatttgcttaggatgcagaaagccatgcttttaatccccagaatgaaacataccctctcacacatactttctcagtttttctgcttccctctctctcaaacacacaaatggtaataatggcaatagatggcacattttagtatatgttctgccaaagtgagcacagatgccatttttaaaaaatagaattgtttaagtagctatgagagtgaggagcaagaaaataaaagaaactaaaagccaatgttctttatatacaaacatacaaaaattttacccataagcacactttcatttacattttattcatcatgtcaattaataattcaatctacacacactgtacatagatgttagagaaacaaacctgaacataaaatatagaatatgtcacctcagataacatctttctgacatccattttttttgtcctttgtgtcaccttaatatcagttatgtacctttctaataatatttaagagaagaaaagactataatctagtcaatggacagagatgaagaagttgagtaaggaaggaggccactcttgacagatgtaagaagaggaagtgcctgaagataaaaatgactagatgtttctgggaagaccaggtgattcaatcactcattattcaataaatactgctgacctctagtttctgggaactctttttgattttggactctcaagattataagattatgtttgcatttcttcagaaatttactatctatacattttagaagaccattataatttgtagcatttcccagacacaaaggtatctctgccagctttcacttacagtttatcatgctgtgttagggacacacatcagtgcagaaggtttgtaatagctgaacttggactaaattctaccttgcagctcttttatcatgaataaaataaacatatctgaaaacatttcacattttaaactcttccacagagactatagggaagcaaagggactttcttgcaccaaaaacaaccttatcaaaacatacacatgtatttttaatctactgaggtggtaacaagttatcaacttaataaaaaagacggaagtttattacttattattttgtaggtcacaagactaaaatagatattaaatcacaagagctggctgtatgtctacttttctgattaatatgaaagatttttttctcacttgatttgtcattctgttgtggaggtcaaacttcttctaataccattttgtctattagtattctgatcccctggtcttcatttataagaaagattttattgtattgtgtccatagaattaatccaggataattcctcaggatctttagccatatctacaaagctccttttaccattagcataatatgttcacaaattctctcaattgggatgtgaacatttgcatgtcaattattcaaccaattataatcttctatgtgctccagagattcataactggcttatttgcaaaactcaattatcatatcccccaaatttttaactctgtagcactgtcatcttaatatcatcactgtaaggtctcaaatcacagcacctaaatgaatcaagataaggcttacaatgattctcgggaaattttcatttcttcctcagacttgtgaaattggaacataagttagcataggtgaaaaaaattgtattatctagaatgaatggactaccaggtatagaaatggtcattcttattatcaaagtaatctctagtctcagataacttttaaaatcaaacagggtaaattctaggaggtttaaaatcctagaaatttccatttcaaatctttcttttctgggtctgccctttggtttttgtctcttccctatagggaattctttgtcagaaaaacataagggcaaaaatatttgcagacaaatagttttatcagcctctttccacgaccatagatatttggacatcaatagatttcttatgcttaatgtcttttctgatcctttatgtgcatcatgtatttagtttccatgatattatcaaagcatagtggatcttctgtgtgtattgcaggaactcatccattagttgtatagttttagaccttttctaaatgaaatgagaacattttttcttgcctttttgagattctggagcttggcttcattattcacttctggttctctttctcagtattcaacaatgactagttaaatcttccccaaaatatgtcatagtgatgctgacttcatcttcaagtctttttttgtctctgattcttctttgtcttgtacatttaaggttctctgagaattcattgaacctacctaaattatcacaaatactatccttaatgcattataggctagcaaatagccataattccaactgctaccttaattatccctttttatgttacatcatatttagtgtgttttcttagtgttgtgatgtggacatccatggcagatggtttttcctttctagcatgctgttaactctcagcaggccatgaagtacaattttaatttactttcagggacttctcagttcactgtttgttgcatgttgtaaatacaaatgtacgcacactgagttggaagaagtaggtaagaaggtaacagatttctgaaaaaaatgtaaattggtatatcacaagacaatgaaacttttcttcagtgtaaaaatactgttacctacacttcatgcttattctctaaagtaaactcttgctcttcagactttgacacattgctggtagaaagatgctccagggtagccattgctgatactaaatcaacatcatctgaaaaaattttgtgttttatgataaaagtatgctctatgataaaagaatttctgcttaaagaacacagaacaaataaattcatatgctaattaataaaggtttcatgcaagggtatttctcatgctgcagtttatgtggttgggagctacaggaaggctggattgttagcatgaatagtggagggatggaaatgagataaataatgatgcaaacagaaaaaaaaactgagaaagaattaagaaaaatgatctttgacaaaggtgagttaacatagagccaagcaaaacttattaccatagattgtaatttccatagacacataaataaatcaatgtatattttcaagataatatttagaagactcataataaacacattaaatcagttttcttttcaacacatcatttgacaagattgaatttgacatatggagcacctgaattttgaaaacctattggcaagggaaaaggaaggaatggggaaagaaaaataagaacaaaaagtaaataatttctaagtaaaatggatttaagggtatagcaaatgaaagccattttaagtaaagtgaaatggatttgaaattatagattaggggctgttgagagagttcaattgttaagagcattttgctcttgcataggactggccttcatttccctccatgcataccaggaagatccaggattcccaatgctggtcagtgtcaacacacaaagacacatacacacatacacacacacacacacacacacaccacacaccacacacacacacacacacacacacacacacacacacagactcagacaaagcaagaggtctggagggggatgaatgaagagaaaggaatataataaaatttaaatattaaaaaattagtgtcttttgagattgtaatttaatcttatccctctttgtcttcccccttccaaacctttgtatatacccttccttgctcaatttcaaaaatacatcatatataagtatgtataatataggcaagaggaaagcaactgtgtggtgttgaaatatgttttctcttacaaaatatcaaatgctgtatagtcttatatgactttattcctataaatttttcttcacttgaaattagtttcaaatttgtatgtgctataatatatcatttttctttgggtctgttttcaagtctattttataaaccaaatcagaaggtgaggcagaagcaatatattggctgtagctcacagagtacagtcacagacagaagagagactactgatttacataagcttacttatgatttttgatagtggattcaggcaggtcatcgggatactgccagtcaaattcagggaccacttaattttgcctccatgtattattaaaataccattttatgttagcatagtgcctcagagtaccagctctgtagcacaaataataaaagcccagagacagatattgggtttcaagctgaaaatcagaaaagcaaaacagccaaaccactggagagtccttacatctgccaagactcagaataaagtggtagcaatgctgtcctccgagtgactgtagacactctacagaatgctcactgtcaaaatcatactgaccagaggctgtactgagctcctgtcttatattcctctctagtgctgggattaaaggagtgtatcacaaatgctaagatcaaagttgtgagctctgtttctcttttacactgattcattctcttgtagaacaaggtggccttgaattacagatattcatctgcttctgtctcatgagtgctgggattaaagttgtggtccccactccctgaactttatggctaagtagttgtttaggtatgtgactaaatagtggcttagtgtgtatgtgactaactagtagcttagctctaactaggtgtgtggataaccagtggcttagctctgcactctgatcttcaggcaagctttatttattagattacaaagaaaatgccactacacatctctgtgaaaactttgtccttattcatcagcaatgatttaaccttaattaaatcaactatgctcttaccacaactcttatggatatttttatcagttctgaaaatcagcaattattattttaagtttttcctagtaactctcacttgtttacatattaaggttttgaattttataattgataatgattgctttaattttaacaactgggaagaactttgctatgaacagtactagttcctagataggtgactaggttaatatcagatttaacaaaggagaaaaatggtgagaaagaatccaggaattcaatgaaaagttttgaaagattatttacctataccataaagaatcaacatacctaattccaacctacacatcatagctacatataaatacctatttcccaaatatgatgacattgaatataaattaattcagtatcagtttctacaaataataaaaaaaattgaagcataattttaaaacctctatttgtttcatcctacttgatgggggaagtacttttgtgtatatgtttgtcttattggttgataaataagcacttttggccaattgggaaccaagttaggtggggctaggagttgatgcagtttctgggaaatgtggtaaagaggaaagtcatcatgtgatccaggggaagagaggatgtatgctgctggcgacatcgataagtctttataaaatatatagattaatggttatggttgatacttaacacagagctagcaaataaggaatactagtcattggccagcagcattgtaactaatattaatctctgtgtgttatttggggaccctaatatggtggcagaactcaggtggctgacagaaatagttatcgttacacctaatatgttctcatacttcagtattttaaaaaataattattttcattgagacttcttcctgatgaattttttctgtgattaatatgaaatgaccttcttcatctattttgattgattttggtttgaagtctaacttgttagatacttggaatatcttatccggaccctttactctgtgataatgtctgtctttgaatttgaggtgtgtttcttatatgcagcagaaggatggattctgtcttctcatccaatctgttagcctgtgtctttttataggcaagttaagaccattaatattgaggggttagttcaatatacataaatccatcaatgtaatccaacatataaatagactgagaataaaaccacataatcatctcactagatgccaaaaatgcctttgacaaaatccaacaccccttcatgataacggtcttggagaaatcagggataacaggaacatacctcaacataataaaaacaatatacagcaagccaacagccaacatcaaattaaatggagagaaactcaatccaattcctataaaatctgggacaagacaaggctgtccactctctccataacttgtccttgaagttctagcttgagcaataagacaataaaaggagatcaaaggaattacaaattggaaaggaagaagtcaaactctcactatttgcagatgatatgatagtctacattagtgacccgaaaaactctaccagagaactcctacagctgataaacaacttcagcaaagtgacaagatacaagattaactcaaaaaaaaaaaaaaatcgtagccctactatatactgctgacacattggtggagaaagaaatctgagaagcatcacactttacaattgccacaaacaacataaaatacctcggagtaacactaaccaaaaaagtgaaagacctgtaccataagaattttgagtctctaaagaaataaattaaagaagataccagaaaatggatagatctcccatgctcttggataggtaggaacaacagtaaaaatggcaatcttgccaaaagcaatctacagattcaatgcaatccccatcaaaatcccaacacaattcctcacagaccttgaaagaacaattctcaactttatatggagaaacaaaagaaccaggatagccaaaacaaccctatataataaaggaacttctggaggcatcaccatccctgacttcaagctctattacagagctatagtcttgaaaacagattggtattggcacaaaaatagacagatagaccaatggaatagagttgaaaaccctgatattaacccacagacctatgaacacctgatttttgacaacaatccaaatttatataatggaacaaagagaacatcttcaacaaatggtgctggtataactggttgcagatatgtagaagactgcagatagacccaagtatatcgccttgcacaaaacttaagtcaaaatggatcaaagacctcaacctaaatccagctacactgaatctattagaagataaattgggaaataaccttgaattacttggtgcagaagaccacttcctgaacattacaccagtagcagagacactgagatcaacaattgataaatgggacctcctgaaactgcgaagcttctgtaaggcaaaggacacagtcagcaagataaaaatggcagccgacaagctgggaaaagatattcaccaaccctacatctgacagagggctgatctccaaaatatacaaagaactcaagaagctagtctccaaaacaacaaacaatctgattaaaatgtggggtacagaactaaatagacaattctcaatagaggaatccaaaatggctgaaagacacataaggaagtattccacatccttagccatcagggaaatgcaaaacaacataactccaagataagatcttactctgggggggaccaaataattctcatatgaaatattttcgggcccagcctccagcttcagcaaacaggggcactggaaagctccggcccactattgtattgttcattgccagtagggctactattgtttaccatggcctcagggtaatatgcctcctatttgcatctctgtgggcctaagcatctgaataggcctgcacctgtgcaaaggtgtgatgtgtgtgagtaactaggaatgacaggagttaggggccaggaccagaggagagatgagaacaaagagagaaatggttccctcttggtattggcacaatggttaagaaacagcagaaaagatggctaataaagaaatgactctagttctacaacatggaactgagagcactctaaagatagcaagatgcctgtgtttgatctttatcactgctgggttactagcagtttccaggtccacgaacccccactcaggcagaacctcatggattaaagctgagacatcatgggacatgacattactcctgtcagaatggccaaaaaaaaaaaaaaatcaccaatgacagttcatgctggagaggatgtggagaaaggggaacaatttccactgtggtgggagtgccaacttgtacagtcactttggaaatcagtatggtgactcctcaagaaaatgtgaatcagtctaccaaagatccagcaattccactcttaggcatataccggaaagtagtgccggccagcagggctctggtaatttgtgggtcagaggtggaccaggcctgaaaataatgggcgagaaagaagaagccagaccaagcagtgtccttgtcaaggtctaaattttattgataacaaggggtttttaaagagaaaggaggaagcagagaaagaggtagtggggagaggaatgaatattaattgctctcaggccagggcaggtgtctggaacctcctgtggttatctcaaacactaacctaggggggggggtgcttgactaattggcagtttagcaaggaggtcgccagcctctgtaaagaaggactttttatatctgaccagagctggctcctgacaaagaagcacattcatacaacaaggacatctgttcaatgatgttcatagcagcactatttgtaatagccagaaactggaagcagcctagatgcccctcaactgaaaaatggatagagaaaatgtagtacatttacacaatggagtactactcagtgggaataaaaacaatgggatcttgaaatttgcagggaaatggatggaactagaagaaaccattctgagcgaagtaacccaatcacaaaaagtcaaacatgatatgtactcactcatatgtggattttagacatagagtaaaggattaccagcctacaatccacacttccagagaagctattaacatggaggaccctaagagagccatacatgttcccctggagaaggggaaagggtcaagatcccctgagcaatttgggtgcacgggtagagtgggaagggagctaggagaatgagaggggagaaaaggagggatgtagaggacatgagggagcaaaaaggttgagtcaggggaagaatagataataacaagaatggaaataccataatagagggaggcattttaggtttacagagaaatcaggcactagggaaatttctggagatctacaaaaatgaactagctaacaatctaagcaacagaggagaggctaccttaaatgccctcccaggataatgagattgatgactgagggagaagggatctgtgattgtcatgtaaaaaaattcctgtttctaagtcaaattttaaaaatctgaaaaaaacataattattttctttttaaaatacttgtagtggttaattggttaaggatatatagtttttgcttttcagtgagatatattactaattctggattaggaaggaatttttagctcctagtttatactctatatttgattggtttcataaaatttataaaatatctcattttaacatctattgtgtgtgtgtgtgtgtgtgtatgtgtgtgtgtgtgtgtgtgtgtgaatgcttatgtgtttgcacacatgctgaggtccctggtcaacatgctgcggtcactggttaatatgctgaggtcactggtcaatattgggtgacttccttaattgcttgccacatgctctttgaaggtagagtctttcactgaatttggagttcttattttaactctactggtgcccagtcagctctattgatctgcctgtctcctttcctgatacagggtttcagatgtataccaccttgcagcacttttacatggcttctgtggattccagatcaggtcttcattattgtgtaacatatactgtatatgtatatgtatatgtatatgtatatgtatatgtatatgtatatgaatatgtatatgtatatgtatatgtgggctctgcaaagtccaccaaatcttcctgtgctggtcctgggcccttccccaatactgtactatctcttttccctctagttttactctattttccatataccttaccaatgtcacagacccctgaaagtgagactattcttataacatggtttctaagataatgttcatctccagtttgcatatgatcttgttgaaaagaaggggcttcatttgatgactccttggatactttcattttaaggattatagtgttgttaggaatggaaagctttgtaagtacaaaataaactttttgtttgtttctgcataaagcactatcatctctggaaagaattgccatccagggattctaagcaaacacagctgggctgctaaagcaacaattagtaagagtatgcaggaaagataaatttgacccagatcaaagacgcctctgctttggccttctaatatttgaagtgtgctttgtacctaataaccagagggcctttgggggactgcctttaatttacttttatatgtggtagaaatagatcctttggtttgcagttggtgactgtgtcatttgaaaaaacattttaaaaactgaaatcattttccatggcaaatggcaaatcattttccatagaggggcttttgttttatgcctcctgaaaacttcaactcatgttcacaagcttttgtagcatgcactgtaccccttgcacacttcctcatgctcacaaatgtaagccccctccctggcgcctggcatgttgtgggttatttgacagatggaaaaatggtgtgtgttttagtcaaaagggactgattaataaagtaataaaccaggatttaattatgagtctttctctcaaggttgtgttcattccaattttccctgtagcttctgatgctcagaaggacactgttgacttttgcagaatttcatgacatgtctagtcaagtgtgaaacaatcacagtacataggcgtatttacttagaactcaagtagactaaacctgaagctgactgtctgtctgctactttccttcccattatccaccctcatgtcaaaaggtgcatttagcatgactccttattcttcccttccaagttaaccagaattttgtatatgccctcatgttccatctagtgttttgatgcacctattaaatcattaggaaagttttttttctttttttaaaatttatttattagttctagttagggaacaagcttgtttcaagtcccttctccctctccctcctgtcacccccaaccctcctcccccnnnnnnnnnnnnnnnnnnnnnnnnnnnnnnnnnnnnnnnnnnnnnnnnnnnnnnnnnnnnnnnnnnnnnnnnnnnnnnnnnnnnnnnnnnnnnnnnnnnnnnnnnnnnnnnnnnnnnnnnnnnnnnngacagcatctggggtccatgtgctctcccttgtgggtttctccaacctggtacagagcccttcgatcttcattcctccctctcttcaactaaattcccgatttcggctcagtgtatatctgtagatgtctgtctctgcttccatcagccactgggtgaaggctctaggatggcataaagagaagtcatcaatctcattctaggggaagggcttttgggttatcctctccaccattgcctggattgccagatgtgtcatccttgtaggtctctggagatctccctggttccagatttcttcttggacctatagtggctctctctgatatggtatctctcatcctgctctctttcctctattcttcccccaactcaatatttctgcccctccctttcctctcttctactcctcttctcttgctcttattgtagcagctcctccccccctaccctcatgcccccaattagttcaggagttcatgctattagtaaagctcttatatgttgtttttcctactcctgtcttgattgtgacaatttctttacctatccctttagatacttttagatggccaaatttgtgatgacacaagatataaaatgtttgtagaatcctatagtaaggaagcagaataaacaccttctgtgctctcatctttctgctaggctaatcatgggtttagtttgctcagagaaagatttggaaggtacagttgagatccctaaacaggcagtaatatgaatccttagagaatgttctaagtggttagtgcagaatagttctgaatttttttgttttgatggatttgtgaaatggtaactcatattaagagttctgattccatttgctttagcattctttgtggaaaaggaaggtaatggtaaaacataaaaaatccaatgtaatcatctcattatgactattaaggaagacaataagtgaacattataatcctccatgttctaccatagactactaatgtcttttttgtttctgtcacttcatgaagctatctttggaatagtatgctattgctatgacattaaggtgccatagaagtatggttttagagtgtgccattgaaagtatgtttgagtttccttaaaatactcatgccctttgagtcttaggatcccagggttaatgtaggaaacacattgtcctacctattttccctgcttaattaaggataggcattggatattggccatcagtatgtcctgctaaagggcccgctctgttgaataaatcacattaataagacccacacaggtgttcaggagggaaagatgcaacactttcctatcttactaacatctttccccccttggccttgggacattacagtacttgttattgttgtggcagctgccataaggttatgcaagactgaagtcctggagtcttgggcctccaattttacttcctctgtaggttctagttgttaaaaactacaacctaaaaggaatttttaaatatttagttgcacaagaatttagctgtgggcttgctgtatatttagtttatcatgttgatatgtgttccatgtattcttggattctctaggactttttatcatgaaggatgtcagatttcattaaagatcccttgttattctacccaggtgctcagatagtttccatcttctagtctatttgtatggtatattatgtttattaatgtacatatgttgaaccattcatgtatctctgagatatagcttgcttgttaatgttgaataattttttgataggttcttaatttttttatacacatgcctagaaatctatcaattatgaagtctgtctgtgtatttgtctactttgggcattgccattctatgtgttaagtaggataatagaaaaaattatcacattgtatatcggttgcatatttggaagaaagatattgacatataaatttaaaaatgaaatgcaaaattatttgatgtagacaaaaactgtaggcatttcagacagtctgagctgaagttacaggttagtaaggttaggcaatgtttgaactggatatttactcatgtatgcaaatataatgaataagattttagtctgtctgaaatcattttattagaaagagtggtttcttgtctgacattttcagattcttgcttcctaatcccaattaatagtttttttccttcttatccaaattgtgacacatgccatctgtctgacactcagaggtgattctacaacctagcaatttcagagaagttttgactaaatgagtggggctttggaagtttgactatagtgagatttggtgccctagttacctttaatagtcatcttgacacagcctacaggcatctgagagaagagtttttattcctcaattaaggattgtctagatcatattggcctgaccatgttgttgggggactgtgatgtttattaattgatattggagggttcatcctactcttgacgataccatctttatgcatctggacctgggtagtataggaaggctaagctaagcaaaagcaagtcagtttttgagccatccctccaaagttcctgctgtatttctcagcagcgagtgaactacctagttagaggtgatgttctgtgaaatagcaagcagtcatactttcaggttcctgcatgagttcctgtcttgatttatttcagtcacatactgtgacctggaagtgtaagccaaataaatccatttctctccatagttatgacagaaaggaaaatagagcacctgggtttaagggatggccaggttattcaccatcataatgctgaagtggcactctctttctcaagtcccttagcacaatctgctttgcatatttagccctttttcttcagagtcaagatcttttttgcaaatattctaatgaagtatcccattaacacatggattctttactgattatccgtctaatggaacaaaagatgaagctttcttcaatcacttattgtgacaatattttttgtcaatcaaagttctgtatttcattttttctatttctcagtttgctgtattatttcagcatactgcatagcaaacaagcaatactcctttatcccctaagagtgccatatcacagttgcattttcctgtgtattgagctttctgttcctgccatgactttcaagaggtacaaatttccccatacatgcagtagttagagcttcatacttggagaactggtgaaatttactgagaatgtccataacttaattaattttggagacaatcttcagagacagaaatagaggcctgtagcatcagtgcatcttaaagcaagcagagtcagaggagagacactggcattacatttcccccctagtccttatagactttcagtgcatattccttgatactcagtaaataaaatatacattaagcagaactcccaacaagttatttgtataaataaattagaaggaagtatcaattcataacaaaatacaattttaaaaattacaggagagtaactaattataaagatgattcagagagcaaaccctagatgaataatcctttaaactccagtgaccagataaatttataatttatgagctttccatgaggttaaaaattaggaaggatttagtacagctgctaatatggtaaaggtactatcttgaaattccaaatggtattcttttttttctggctgctcaaatgacatttaggatttctctactgccaaatacttgtaacctcttctttatgttttattataattctgtaaatggcaccgctctcttattttgcctctgcctcatatatatgaaggaaagcctcatgccttgtgggtctttttatttaacctcttccaaagaaatgacatctttggtgtttgcccagtagaatagccatagagggtgtggagggtgaaggaggactgagctccagctgtcagtaattctcaggaaaggatatttaaggagcacataagaaagctggagtggccaacttcagaatgaggtctacagttttcttcaaatgctggcctcctccacttacagtggagacatcatacctcagattagcttttacttttagtgtgtgtgtgtgtgtatgtgtgtgtgtgtgtgtgtgtgtgtgtgtgtgtcttgccaccatgatgtttgtatactacatatcgagccaggaaccttctagcagatcaaccactgatcttaaccactgagcaatctctccagtcccatgattagtttttaaagagaagcttcatgtaatgaggcttatccttactttaactagagggcaaaaaatattctttcactgcattttataatattatttaagccattcgcaggacaatcacaaggctctcttttcattgtttgaggcaaggaaggttaggccaaactctttgatattttactgaatacaatacaggattttaagattttttattactattacttattgattgattaagatgggtctgttctaaatgccctggttcttctcagacccatggttctcccacctcggtgtcctgagcaccaagattgtagacatataacaccatgctggattgaagatgttctagaatagatttgattctagaataggaagtgttttgaaaatgaatggcttttaaacatatgatctgttcaattatttaaagatcccaaataaaacaaacatccgatggcaaaacataaacttactgtgtttggtactcatgaagaacacatccacctctctctctctctctctctctctctctctctctctctctctatctctgtgtgtgtgtggggtggtggtgtgggtgtgtacttatactttacaatactgtgtaggaagatcaaactatgaaagaagacactccaaatatccttccaaccctaatatttcttgatatttgaatgatctgttcaaattaaacaaactaaaatattcaatggtgatatttcaaaagatattatatgacaaagtaggggcttaatgtcaccaacaaattgggaaaaggtcatcaattactttaaaggtcacttcaaaagtgattctaaagatatattcaaagtaatatctcagactctaatgttaaaaaatggatcaatttcaacttataatttaattgaacctgaaaacatatactttcaagaaaacaatacttataaataagattattttttcttctgattttattaatttaggggaggatatcatcatatatggccagtatgtgtatgttctctttttgtgtaaaagttataaacagtggattacacagcaccatttacagggaaaatataactatggaacgataaacaattatattcgagtgacttggattaattaattaattcatttattttacattccagccactgtttcccttccatcttctcctccaagccccttctctccagacccccttttgtttccaacccccaatacactccccttctgttagttgattctgtgatttttcttgtggtgaccttgaaccctctggctcttacaattctttattcacctcttcaacaggattccccaagctccacctaatgtttggctgtgggattgcatctgtttccatcagttgctgaatgaaacctctctgacaccaatctgtatgtatagaagaataatgttaggcatcattatattgacctttttgacccctccagttatgtttagttctaccctaggtctctggtttatcaagcctgtgggttgtggtgctccaggcagtatcagcagtggacttactctcctggcaaatgttttaggctagacctatcattggttagctactccctgagtatctaggtcacccttaccccagaatatctcataggcaggacagactataggttgaaggttatatttctgggttgttttcctactccatccaattgaagtcttgcctggtcacaggagatggccagttcgagcaacttatccattattactagaggtcttaggtggttttatccttgtagtttcctgggtgattgccttgtgccaagtttttacctgaccctgtaaccacctgcccctttcctgatcacacatgtttttatttgaccctgtaatgccattcccttttctagtagtttctttcagtattctcctgctccatcctcccccacaaacctgattactcatgtttcaatccccatacaacagcaacagttcactcagaaaatctcttccatttccccttcccagggagatccaactgttcccccttgaacactccttcttaagtagtctttcttggtatatggattatagcataattattcttcattttacatttaataaccctttaggagtgagtacatataatgattgtctttctgggtatgggttacctcactcaggatgacttgattcttgttccatccattttccttcaaatttcctggtgcccacctttttaacagttgagtaatactccactgtataaatgtaccatattttctttatccatttcttgtttgagaaacatgggttttttttccaggttctggctattacaaataaagccactcagaatgggataagatcttcaaaaacccaatatccaaaagaatgaatttcaaaatgtatgaagaagtcaagaaactcgacatcagcaaaccaaatgacccaattaaaaatggggtacagatttaaacagaattctcaacagaataccatcaaatgtctgagaaacacttaaggagatgttcaacaaccttaggtcgcatgagccatgtgatttctttggggagcaaggcctgaaaatagctttaatgtctctcagggtggaagaccctggagcccctgacccagttggtaaagacctatggacaattttctgcataattctggccatgactctggaagcatatgtgctaccttctctccttgttattaccatattgctggcctgaatgagccatagagggtcatcaagtttattattagacatttgcattactgttctgaaaagaatgtttttagacactagagtatatgagaaatgttattaaatagctggtttttaataataggagttaattggagcagtctatgaagaagtaatgaaacagaattatagaaacctagagttccctgttttctaataactgtgccaataccctaagaaattatgagagacagacatgagaacaagggatatacactgacaactattaagagtaagtttcctagttgtgttgcttataggataaaaagacaaacctcatatttccccggaagaaacagagtagtacagaatgtagaatgaattgatccagctttggctggtgagttgattgtgagaacccagaccctaccagatattaaccactagaggcaaagctctctttcaccatgcatgacactgtaactgcataagtatatgtagttctacctgtaggtgtgcctagttagaaaaattccttggtgctttgcatcactgcctctactcctaacagtagatcaaatggctaccagtgggaaagttgggaaagaaccaaagtaacaaactggtaactattgtaaccattttattttatttttttttagtaacttgggaaggaaaattgattgtaaaactgttcattcaaaccattaaagctacataaataaaaacatcccaggatgtctggaagacacttgtttgaattacaacaagtggtcacaatttctccatggcaccaacttttcacatccataccaggtcattgtacccttctggagcaaggcttacagcacttggctacgatggaattgcaaatcaaggggactctgagattttatcttatatctgtcagaattgctaagttcaaaaacacaagtgatagctcatcctgaagaggttgtggaatgaagggaggattcttgcattgctggtaagagtgcaaccttgtacagctactttggaagtcagtgtggtggtttatcagaaaactaggaatcaatttaccaaaagaccccgctatactactcttgggcatatatccaaaagatgctcaatcatatcacaagggcacttgctcagactcacattttcaaatcactgtacttaaataatgttaccttctatttcttctaattctatttaatttttaagttgttttgcaattacaaatctatgccaacagaaagttatcataaattaaagtgtgttcacttgacaaatcctgtgagagataccttgggtgaatggtttattagactttttgtgctttactcattacaaaataaccaaatcaactgccttgataaacctccaacattgaattaaaaaaaaatgctgtgttactttcagtatatgaaaagcattcactttgtggtgcactgagtttcattttctctctgccttttccccagtgttgtttatatggctgagtgtgctgttttgattgttgtttactaatgacaagtatatgcttacttggcctaggtgaggcttttaattcactataacatttctggtttggaattccccaggatataaatcaatatcctaactatatttggattgtttgacagaacatgctttttcaaatgctcaaatccttatttaagatgatctcatgcatgttccttttgtaatgtgaaggatttcacagaaaaccacttgttgacagtattgcagtatggcatcattactgggtcaggacaagaagagttcacatgtgcaaactgctagcatttccatgttgtgggtgggagggagcacagatttcagaagatggagcctcatttgtctcacaataaaccttgaaagttacttgaggtttaggttgatttttcaaattaattggtatttggaagttgtttttgttatgacagctagaagaaattgagtttgaaaatataagaatttgaaaacatgaacacttccaaattatgtcagcattaaatgtatactaacaatgtctaactggttatactacaaaaagaaacattaaaatgacacagttgatcaacaattaaaatccacagttgattgatacgtgatcacacatattgatcctttatgatgaatgactctaggaaactaatgcacatttaaactaaccttctgtggacagttatgttttgtcttattcagacattttataggaatcagcacatgcagatatatgagcctcacatgcagaattttgcattttaatgtatgttactttgacaacaacactgacagctgagagggagtctcatatatcttttcttttacattatgtatttgttatgcttatttggccactcactgagtctcactattgctgccaatatgctcatgagtttgaagctaagtgtttattaacaatactttgtttattttatgcatagaattttttaatctcaagtatgtgtgtactagtaatgacagtacaactgtttgataggaactttctttaactatgaagaagagacaaggttcccacagaggtatagaatatttccagtcctaggatttttgtttatttcaagtatgcaattaacccccaatctctttaaaaccacatacagcaatttcaggtctctcctgaagtattttccaccacattatctgaattctaaataaattactttgtttcaatgtaatatctcactgtaatgctttaggatacacttattatgatacacaggcatgtctcttttagcctttacgtcttttgtcacttcgttctagaaagtccaaaaaataggtccctgttaggtcaatctcacaaggccccaacctagatgaagagtgataggcaactgatgactgctgagaaagaaaaataggttttaacaaggaggagtcacttaattgcttatccagggtttatgccggcaaagaaaacaaaagtcataaaatttaacccaggaaacaaaggaagtaattattctcttttggagatgcctaattcattttgacacttctcatatcttgttgatctgtggaagttattctgtgtgctgggataggaataaaggccagtggggaaaaggtttttagaaacaacagacatcttggaatctgaatgattatcatttatgttattgtatatgctagctgactttgtacatttccaatggtattttagtgtctatgattattctggataattagttagaccaagaaaatccaagaaaagttacttggttcttactaatatctctgaattgcttgttctggtggaacaaaacctagataagttaattttacaactacaaagttgatatgattttgttgctgtgtctgagcaccattgggatattttaccttctgttattctataactatgactggaaccaacacatgtactttaagtacacctggctggccacaagccataccagacttattattcatttgtatttgaggacatgaaacaaaacaacatgtgaaagaacttattaaaaatttataatgataattataatgataataggctatgaccaccctctcaacatatttaagttatggaattttttcaaatatttttggagccttcaggataaatacccagatgtctttaactgaatttgcatttttatggcttgggaagacaggacgtgaataatcatgtcctactgattctcctgtggctaacaaaggtaaaatcaccaattcttggtggttgtttacatatttattccatccttttagagatctacacagggtggacatctgttagcttaatactttcattgtatcctctaccatattttatttctttataaaaaagactttactgtgaaggtcatgatcagaaacaaatcgaatgctcataaatattctatgacacactcattgaattacaagtggagaaagtagtatgttaaatttggagtattagcatattaaacatggtcacaacaaatgtgaagaaataatatctgtaagtttacaatggggtcaggctagcacaatataaaatcaaatcttttatcctattctgtctttatgttacctgtgtttatgaatacagcacaaaaagtagacaaaatataggacttccattgctcaaggcttttcttttactttatataatacattcaaagcaaattctctttatactttattaattatccaccaagaaaaatcatatttccaagacagcttgcctctgggttaccaagttgtatgtttaatttcttctctcatataaccataaacaatgaaatctaatttcgattttcaaacatctaatgtgaacaaaattaacactggaaataagtaaatatggaactaaatataatttgtgtctatttatttcttttcagaagctttatgtactataattctccaggataagtcttgtgctatgagagtagttggactgatcacacacaaaaaattaatttgataccaagactcgtcctttgaacaaacaagtctgacgagtctttaaaattatttattttattatttgagattataatataattaataaaactccccctttcttttcctccctctaaatcctttcatacaccccaccttggcctccttcagaacctcccccaatcagggctcagtgagccctgcagaagatgaggtaaaaagagtaagaaccagaagcaatggaggataccaggagaacaaggctttctaaatcaaaatgtcaatgcaatatgaactcacagagatctaggcagcatggacagagcctgaaaaaagtggttacatgtccccatccctaagaaagaaactatctccagttgataagctcttccaagtgaaaattcagttttttttaaagaagtctcactgggaaaaggaactactactaagtgtaggatgaaagcccaataataaataaccaaacagaaaataaactctctctctctctatatatatatatcatcataacctggaactgagtccaatgcaatcttactcctttagtctgctgttgttagggtgtttgccaaacaacaacaaaaaagaagcttgtaaggtaaatcaataataattgaaagagaagaataaatataatttatgagactatatttataaagtcataaaacataaatggtgaattaaatacatgaggtttacactaaaaaaacacacgatgtatctaataagagttgtaaagtgaaaataaattaaagaaggagaagcaattagtatgtacttttaaaatggccactagcaacctgcatttttattttgatgaatctaataatttattggaaactaagtaaatatcacatctagaagaattattttgatatatggtgtcagacacacaaaaatgagagaacctagtctgaaaatttagttaaaaagagaaagcatctctaaaaaaaactaaaaattatataattccagttataataacaacaaagtacatatacatatagggaagataactaatggaagaatttagagaaactttaatgaaaatctgagaattctagtagtcatgtatcaattaaaaaactttgttgttgtctctagatgatttattaggggtggaaaaatggcagacaaggctataatttcaaaatgagaaattagttgatattagtaagtttaaaaaataatttactaagccgggcagtggtggtgcacgcctttaatcccagcattccagaggcagaggcaggcagagctctgtgatttcgaggccagccagttctacaagaagacagcatccaaagccaaagccaaaaacaaaaacaaacaaacaaacaaaaaaacacaaaaatctttgctatgaaaatgttaatggcttaagtgaaagtaattaaaatattaaattaaaaatactagaaaacagaattaagatatttgggatttgaaattgtcatcttatttatttcttagaagtagatacttaatacattttgattggaatatcagttatttttcttaaatatataaatatctaagatgtaaaataataaagaggtacaagagaaattaaattaaaaatttaaatttaaaaagttaaaaaattttccaacaaatataaattgaatcaaacataaaataatttaatgtttcttaatatatcagaaattaaaactaacctaaatttgttacatacacctaatggaagaaaatggttgttttaccttgctaatgaagcatctgaaatgtttgatttgctatatcaaaattattttaaaccaatttagtatgcatatctaaaatgttcacaagaaaagaacattgacagacttattttaaaagattcaaattcatatatcatttaaggtagtaataattggactatcaacagcaaccagtctcatttcagaataatgataaaaacaaatattagtaaatataagtactatgcatttggttatctaaagattattccacataacatgaagagcttttgaaactcactattcagaaacaacgccaggagaaattggggaaaagacatgaatggatgtctaagaaatggatgttcaggaaatactcatcttaactcatatttggggatttgtatctcacacaatattgtcatgaatcactgtgagactataggacttcttcaaagcattaagaaaaaccatgctgggattttgttgggactgtaaaaaggaaggactcgggtctttctgacacagcacaaattagtagaagttaatgacaaagatgcaaatggaagcaaacatatacacatatgcatctatagcatcgtattcatacaactgaattgtggataaaagacccaaattagttggtgccatacatgtctacaaactcacatgtgtgtgtgtgtatgtgctcgcgtgtgcgtgcacgtgtgtgtgtgtgtgagcgcacacacacactgcaacagtatttctgatcataaaatgaaataatgctgttgacttagaatacatgcaggtgaatgagatagggcaaatataagtcaaacatgccatattcactaattaacaagcttgggtactgaaggttccaaagggtcattttttcattgacatagtagctttttttaaatgaacaatgtaggaaatgggatattaagatacacaacatagatcttttctagccatccgccgtggtgggtggatgaaagacctgagctaacctggggttagctcgttaaactataataaagcctcgtgctgtttgcatcaagctttcgaatccgcctggtgattggggtgaccatggtcctgggctgagatcttggaggcctgagcttctgggggtcttacatttgggggcttgtcctggatttgcgaccacccctcacctgaatggattctatcttgtaggtaagctcgatggagctcacaacttatatgttcaatgttatgtccatgtttgcttgttatgtctcttgctgtattgttggtttggtgcaaagtcaaacttaaatttgatctgtgcctgtgacttgtatttggtaatttggacctcagtgggagacagatgtgtcctgtgactctgatgagttctgccccggacgaaattccgagggttgtgtgatttggaccatagggaaagcagacgtgcctcaaaggcagacgtgtcctgagaccccttggtcctgccctggaagaaactccaagggttgtttgtaattttggtttggtgccatgtctgtaatttggtctgccacgcggtttgtcctgtctgttgtgtctgtccttctgtttttgctgtttgtgtctgtctccgtactaaccaccccctccccggattccacctcatctgtgatcggcagatgtgccaggtggatcacaaactgctgccctaggacacccaggaggtatggacaggggccaaggacacttggaccctcctcagttagcagcgattgtagctgcctggttctgccgcccgccttcccagagccattgccttataagtggcgtgaatggattaggttggtgtatgttcttttctgtctattctgtctctctgttttcatcattggttttcaattcaggatctaccatgacaccccctttcgttgagtcatatggtgccacactaagtaactttctttaccagtctttgtttctgtacggtttctataaagcctggagggttggaacaggctgggtgactaggcagttgagcagcagggttgctatctgtggtctgatgtgttgcagcccataccctccctgtctgcttttaggtggtgtgtcagttttgtgttttcaggtctgttgcttctgttaattttgttctgcccaagtttcattcacatttgtgctgtgtgtttgttaagcatctctttctgtccctactgcccacgcacgtggcatgggacaggagttcctctgccatgcgccatgggttagagtgtgctgctgcggagtcccctgaggctgctactctgaactccaaccattgctgcggccctcacagctgagcctggcctatgaaggtgagtctgtttttccatcctcatatgccggtctgtgaggcatgtgaagtagggctgtctctgccccaacttccatcctgcggtgggtcctgtcttgtggcggggggttttcactgaggacatggctgcaaggccaccatttgcccagctgcctggtcttctctgtgtccacacatgtggtatgcagggaaaccatgggggtctttttcccaccccagcattggcagagggtcttcgattaccagcagcacctcccacccccaggtttctaccctgagcatatggatctggcctgctatggacattctaaagaaacagccttaaagttattaaaaaatataaaagggactttgataagagtttttatgatgactgaaaaatgagagagaatgtaggagactaaaataataaaaaagaaaaaaaagaaaaaattgtctaagaatgtctaaggaaatcagagaaatgaactaaaggtatatagaaagttataaaggattaaagcaagtcatggaaggtcagaagaaaggttgttaaaagtgagagaaaatgtaaactgtttgctacggtttctcatgtcttcaaatagtaaattttaaaagtggtaatataagttaaaattttaaccatattaagttaattctgtttatttctcaagtaaattatgcatgcttgttttaaaatgttgtttcctggtataacctaagttctgttacaaacatacatctaaaacaaatggtgtaggtcaccaccattttgtagccagctacatggcaaactggtcacatggctgactggtagccattttgctgaatttgaaaaaagttacttaaactgccatcttgactaaagatgaccacatggaaattagagataccatcttagaaacaagtttttcagttaagatttaaattgttaatacttctatatattacagaaagacattaagggaatttaaatttctttttacaaccagttttttttaatgtttatatttttaaaatgtcttttttattaatgtttgtacttaaagagcttcaatttaaaatcatttttaagcaaagcctgacaatgtaaagttcttgttttataaacctgctaatctattataagatgttacagtttatgctttcagaagttaagtttagggtgttggtggcacatgcctttaatcccagcactcgggaggcagtggcaggtggatctttgtgagttcaaggccagcctggtcagcagaccaaattctaggacaggctccaaagccacagagaaaccctgtctcagaaagtagttaagtttaaacaagcagctaaaatatgtacacgtagctactgtttaagaaatataaggtaactctacgcagttttaaattcagctgtgctaagtttcaaatattttactaagttaaaaccagttacagtcaggctgaaaattaattacagaaattaattagaccttacctagccacctgtatgcttaatgtgtgcttaaggcaagtaactaaaacatacagacctctaatgcttcagagacctgcagaatatggcatttaaactgttatctttaaagtttatattatcagacagactgccagatcctgacagtgacccaaagtctccatagaagattatgaggcaccccagttcctgcacctggaccagtgagtgagatgctgaaatgtgatagctgctgcctgccataacctggccaagactgtggacaaagctgctggacagtggaaaattgactgcaccccctttgtgtagacaaaacaaggtcagtcttttccatgtccctcttccacagagagaannnnnnnnnnnnnnnnnnnnnnnnnnnnnnnnnnnnnnnnnnnnnnnnnnnnnnnnnnnnnnntttgagacatctgcctccagcggtaatggagagacttgggtatggctaactgtatacggaatggcttctgtcactttttagtagatttggataaaatatacccttttcagatctctgaaatattaatagttgtcagcttgacagcatcggacactcagatacacaagactatagtcagcatgttagctgataaagtaatgactacctagtgttcagtcacatgctcaaggcttttaggtttattttggttgtcatctaattataaacttaaagggcttttcatcaggccaaaggcacttctgtccaatccgtacctggctctctggacagaagaaaaatgtacatgcttctagcccaaatctgtagttattgctaggaatcaaaattataaatgtgtttctgctgtttgaacagacatccagatatctgcttttttctacactatgggcttcagtaaataagttttaacttctgttcctactttaaacatgtcttaaacaggtttctgcttctggcagatacttctgagtatatcagttgctgactacaggccgttcctatggagattgcaaaccctgtacttgctgtggatgtgaaccagtccagctgatatggacaccccctgtctctgcaacagaggctgccaacagctcccaatggattccccattgcctaaattcctttttttttgcttttgactagcatttcagccttcttgggtccctaacttcgtccccaaatcaacaggaagtagcatgagaaagaatatgtcacccaatttccctggttaaaatgctaagtcagaagaaactcctttgcatggggatgccaatatatctcactccctgatggggacgctggagagacagcaattccatgatgggaattaaaaaaaaatgagggaatgaagggaccagcttcccatttcggcagccataatagccgaacacatgcttgtctgaccttgtcttagtcactaagatcagatgcccaccccttttggcagccataacagcagaacacatgcttgtctgaccttgccttggtcactaagaggtcagatgcttgcctcgtggcaaggaaccaatcagaagttagctggtagtgctatgctttatggctgtgggtgtgctttatggacaagtgcacagcaatgatgtgcagagcatagcaaccactctggagggcctatgggccataacaaccagttgaccaatcaacatagggcaaaccctccaagcctggaggcacactaatcctgagcctgtgtgtatccctagacacgccccttacactgccctataagatctctatgcatacacttcgagctgtcttttctagccatccgccatggtgggtggatgaaagacccaagctaacatggggctataaagcctcgtgctgtttgcataaaaaaaaagaagatacaatacatagtttgcaagatggcttattgagtaaaggtgtttgtacccaagcctgtgtttgatctttgagactcaaatgtttcaaagagagaaccaactcctgaaagctgtcccgtaacacctcatgtatgtgatgtttgaatgtgtgccttccctctgcaacataaacatacactaaataaacaaataaacaatggatagataataaatgtattttttcttttaaaaagttacacaaattatccagatttaagtgcagattctcttatatatttaaattcttttatatattctttcaaaatttcattcatatgtgcattgcatttttgtatatctgcccctcaatctctgtccaatttccttcagagttccatcacatcttactctcaacttcttgtacgtgtatttatttatttatttatttatttatttatttattgtttgtttgtttgtctgtttttaatttgaactattgctttaatgcactaagccaagtatctgtatgggaaaaagcaataaatttgaaacatgaagctttgtgtacttcccttcctttaaatctccattcatcaaaaacctcaaaccatagaatgtagattgaacatatccttaccaaaaagtaaacagtaaataagtaactgagtcagttttttgcagtgtttccactatcctgggaagaacaaaggctatatgacatagaaatggaatgattttagtgaatcatgatgtgaatcatgaaccaactttcaggagttggttctctttttgaaacatttgggtcccaaagatcaaacacaggcttgggtgcaagcacctttactcaataagccatcttgcaactcctactaatttatgactgttttgtgcacatgtgaacacatgagaaagaaacagaaaacgagggaccaaagagaaaaagtacacttcactttaggatatgtaattccctattttgatactgtgcatcatgtttacattttgtattatctcctgtcaaatatgttatccctggtttgagatgaagctagaaaaaaaaacttaaagtagtggtgtggtaacattcaaatttacctctgaacttattttatatatccttaaattttctttgccaaactgaagattcacatgtgacatgggtttaatgctgctagctctttcttgattagaattagatctcatgaaatagtgtctttttgctattctgcctataacaccctactatctatgaggcataaaaatagattttaaagattaacacaataatgacagaatagaaacagttttaagcaaccaaacttcatagagaaccctccaattatgtgttattattttttaatatagtaatgattactattgattagtgcataatactgactaatgaaatctatctttttaaagagatcttatcaaaatatgagtattttctatgcagttgtagatattttattgtttatatccctggtcaatgaaacaggtggatcacacagaggagaattaatttcctgatttaaaagacaatatacagtgtaaagagatgactcagtagttaagggagattgctgtctcctgaaagtccagagtttaattccttgaacttacatgaagcagtacacacttcctctgagtcaagctccaggggatctaacaatttctagaatgctagagtaaacacacacacacacacacacacacaccacagacacctttaaaagacagtagaagtacagatgactcttgtgtataggcctataagagttaaatcaatcaaataacatttagataacaaaattattacaaagatgaatggttgcaatcacctcactgcatttgcgacagccagttctataatgattttgtatctgtatttagggtttccaatcttgacagagaatatcagcattttatgcatgagtgaattctcatgtcatttttattgttaatgaaggcatatgcaatgttcattctcatgattttttaaatgctgtttaaaatgccaattgcattcaacataggctctgatgtattttttcataacaacttcattattgaattattcagtattttttttaaatttggccaatcattgaaaaataatcctatatagactaatatttttgagacaggatttctctgtgtagccactgtggctgtactggaactcacttttcagaccagggtggcctcagattcacagagatctgcctgtctctgcattccaagcactgaaattaaaggaatgcaccacaactgccagaccaatacatcctaattttgattaagactagaattacttatgccaacattatttgcattttagcttgttattattactcttaacttccaaactaaaggacaaatgagaattataagtaaaatacagcatgttacccctgggaccacaagcagcaataattcagttaactaaggcaagtgcaacattactttttatgatggtatgtctctttaagatttttatttaaaatatcacacccattctgcttcatacatttcagagcatttttaagaaatgatatccattacagtggatttatccatgaatgtcaccatgaaaacatgctttgttcttttttttttttgagacagggtttctctgtgtagctttggagcctatcataacattcgctctgtagaccaggctggccttgaactcaacaagatctgcctgcctctgcctcccaagcgctgggattaaaagtgtgtgctaccagtgcccagtgctcttatgggtttttaacattctaattattaattaacaggaaagttgagagaagcagtctttagtttttggatctctaggaaaaagagttggatttacatgccaggactgagacttcaatctattcatttagcattaatattccctaatctaggatattttaatgtttaaacaagtttttgtgctcattgaactaatggccttgtgtacaatgggcaaaagatctaccactgagacatatacaggctctaaattttatttctgttttagtttgtaatttcatagaaaacagaacaaagttgaatggttaacaactgcccaagaggtatttcaggcagtggagagatttatgagcaaagggtgttacaatatgagggattttattctttacccttgtatctttgctttagtcttcagcattacttgtgttgcttgagatagacagcacagggattccatgagcctggttgatcctagttaataatgcttttgttccacgaagattctggattccatggattctcctttgttgttattcctctaagtctgatttctctaatgctttagaacaaggaatgaaagccactgacattctcatcatgtacctgaacactaaagagaacaacaacagaacaaggagcctaagggcttagcttttgatggatctctgaaatgacaggacatttctcctgagaattctccagtccttgtcatatcagagacattcacagcaactaggcaaccttgtaacttgtgaaataattaccttagtcaatatttcatattttaaaattgtgttttgttaatgaattttagaaaatgtctcatatatcccattttgtcttcagatttgctatttagccaagtgtgatcttgaactcttgaccctcttgtctctatttcccaattcctaggattgaagacaagcaccatcacattcagttgtgtacagctctgtgaaaagaatccacagttttgctcatctccttcaaatgctttaccaagtgagctatatcccaagaccaagggtgttcttttttttaccattattttattataattgttatttgtatatatgcatgttgtgtgtgtgtgtttgtgtgtgtgtgtatgtgtgtttgtgtatgtgtgatgtcatgatgtgcagttgaagtcatgggtccttccataatatctcggtttcctgcatcaagtccatgttttgggggttttaaaaacaagcacctttacactataagcccctcctgacccaaggaccagtttaaaacatggactctgaaccatttgtttatgtattactaatgagataattctaaatagaatagcttgttcccagaactgtagaaattaatttctcccatttccccatgactcagctatttaaaaagaggacaaagcttcactatatttgctctaatgtaattatttcatttgtatacttagtaaaagacctgtgtacatataaattacatacaagcatacaatatacattcagttccacaaaaccaaaacccactattatttctatctaattttgaattgaaacattccctcctagagctgggaaggaggctcaggaacttagggacttattgggttctagaagcactgaaagttccaggattcatgaggctttttaccaatgttctatcaatagtaaacaattactggggggagagaaggtttcctgcagtagtgctgcctgtaatttgattagggggtttcaggggttcatattttgtgattcttcaccattacatgctaggccttttattgataaaggtgcacttgagtcacctttgtttctgaaagtagcctcttgctcattcgatgtttaatcacaatttttaacatcatcttgcagttggagattatcctcatggggcgttttctggattaggctagttgagatgggaagatatgcccagtaggcaacaggcactctcctgtggtagtcaactcactgggtcactgtgcagcttggaattattttcactctctgttctgaggtatttgaagatttaatcacatctgtccaggaaagctcatagaacaacaaaaacatctgtcattcttaacatagttcacatttaaccttagttgtccctttctggatgaaattgatgggtgacctcactattctaacacacaagtctttcaacagtttgattctaatgtgttaccccagttatgggtcagaataacatccatgttctcagactgcactttcaggatggtgtgtgtgtgtgtgtgtgtgtgtgtgtgtgtgtgtgtgttatttcagtgttctttcttctcctttaaagtcctgctccaagttactatttctctggaaggctttaattcatcattcaaaactccaaatatacttctagtatcactttgtttaatctagtaatatagtgcatttccatttctttcattgtgaatacctataattactcttttaggttacttgacattacatatagtggaacatagaaattattcttctggttgcaaagatgtcaatttctataaatgtgtgagcttcttcaaactcaaagagatttattacaactaaagaagaaaggcttgcctatgggatgaaaattttgggtaagcactgatctcgtttcattagtatgaggatgacagcacttaaggtctatgtgctgtgaagagttatataatcttcatatattaggatacagactccatgttatgctttataaattatatcacaaatgggaggtcatgagtgcacaattaattttcagtacccctaacccctacaaaggatgataggacatttgtctattgacaccgtgtccatagaggtgtaatagctaaagaattttatgtaacagagagagggaaatgaaaatgagttatttaatggctcagccacatcactgtggtatgcagagctgaaatttaactagagagatggaagttcatgaccaaaagacagagtcaaaatcagatagcaggtatttttttttttaatgaaatcactgggatagccatgcagtgtctacattaaaaagtagaggaagtggttgtttggataaatttagggtatttattatctagacttgccttactctaaattgagcagcaggatcagaagccaaggaaagaggaagttacattatgcaattgaatacccattaagagagaataaaaactgaattggcattatgaacccagcctacatttctgctcagctatacagattatggagcttatttgctgataggcttggagattaattatgaagaaatatactgtgaatcagagttttgtgagtctgacaggctttgcaagtcaatgaagtgtttagtaagatgaatgaattatgcataggacgtttttcagaggtgatgtaggagtataaaatgtatctgcaacccttcggaactaaggataatcaaggacgttagaattagtgaaaaagacagagattactgacttttcaagaaacttaagtaacttttaaataaatgtaccatattttgtttgctttcaaactttcatttaaagaattttcattcaagataaagcctaaaggtaaggaaggagacatgagtagtagattctttatataatctctttgaatgctaaagtaatgaacataagtactcattataagatatttaacatctcttatccaaaaagaagttttaactgacacagcaaagcacaaaagacataaattatgtgttgatagtcattctattctcacttttcaaaacaaaatgtaaaccatcctttacccataaattagaccaaactgattagaaagattctagccaccctacaataagtattttttttctttttatgtcattttaagatccatgtttcaagaatcaaatcagtctttatgcccacagtgtttctagctctatgaaatcatgtctttagggattcagtccatcataattggtgcactagtgagaatcacttttattttgatccaatctcctagaaatggtaattgtgcattgcatgtgtctctaatgaacatcactatttttctctttttttcatttatcatataatatatcctgattatagttcctttccacatctcttcctatttggatctatacactttctgtctcttattagaaagcatacatagttttaaatataaacaaagtataataaaacaaaaaccaatatattgaaataagacaaaacaaacagaataaaaatatcccaagagaagccacaagaaacaggttcagacattcaagaatctcataaaaactagaaaacacatcatatatgcaaaggactcataggataaaaagaaagaaaaaatataaataaaataaaaattttaaatgagataaataagaacaatcaatatcttattttactttaatgcccactccaagaactgaaacctacaatttacagtgcttgggtgaacaataaccacagactagatagcccagacacctagggaaaaacaaaatactaatgattttaaaaaaatactactgataaaataactcctagtactattctgcaatgcaaaggacagtgttttattcaccccaaataatggaagttttctcttccattagatagaaaaaaatatactgacccatagccacacattactcatagagagaggctttggaacacaaagctctaaatggtatgtctacataaaatcccttccctaagatttcagggaaccctcaggaagtgatggtaaaaagaatgtaagaaccagaggggataaagaacactaggaaaacaagtctatttaaattaactgagcaaagctcatatatgctctcacagagattgaagtagcaagcatagggtctcaacaggtctgtaccaggtcctctgtgtatattaatagctttgagattagtattttatgggacttctgagtgtgtgaagttgtgcgtctctgattcttgtgcctgccattgaactctttccttctgttggcttgcgttgtccaaattctgtataattttcaataaattcattgagtattattttattatatattgctataatttcttagaggcttattcttttataaaaaagagacagaaaaggaattgatccagagagaagaggaagtggggagcagctgggatgaatagaggaaggagaaattataatcagaatatattgtatgagaaaataatttgttttcaataaaaggaaaaaataaaaatgtattaaataaagttgaaacaagcagcagcaacagaaacaacagaagctgtaacagccatgacaggacagcatgagacaggaagccttcaatgaccctgttaagtttgttttctgttggctatctaaggctgggaatgaagcccacctgtaagagtagtttgctttcccatcaagactcccttggaaaaaaagtaaatactatttacaagtggatatcaatagctcttgcattagagatggggtgcatatgtttatttctacttacagttgtagcactttatttgttgcaaacactgcaatctgcttcagtatctgtgtgttcatatgtgcatcaacaatgttgagatctttgttttcttgaggtcctctatctcctctgtcttttatataatactttctggctcttctggggcactccctgagcccttaaaagaggactttgatggagacatcttatttagagttaagtattccaaggtctcttactttctgcataatgtctgtcatcagctgcaggaggaagcttctctgatgttggctgagtaaggcactagtctgaggatagcagaatgtccttaggagtcagtttgttgctacagatttttctttgttttacacagaacattattatttggttttactctgtgtatctgggttatctagtctcacccaagtgtcagatatggggtccatcttatatagtgggccttaagacaaattacatattgctttatgcccacaaactttgtgccaccattataccagaatatcttatgagcaggataccattgtgtaccaaatctttgtgtctgggttggtatttatgtttttcctttggtaacattcagagtacctgcttggacaaaagacactaacacatacggaagaagcctccatgaaggtaccagtttgccttttctgtattcaatgagttgtacatgtgttgttttcatcaatggggcattgctgtctctttgtggagagcaacctatagttttggaaatagccttggttctttgggatttcccctgggacttgcttggccaataactgaattagatggaatccaatcttgagactggaagcttcctttggtgacatgcctagttggtgcttttttgcccctgttattttatgatttggtttacatctccatatgcttttatatttttggaaacttctactatattagattttcatactacccttcaaatgtcttaattttatctattgctgtattgcctccctacttgatcttctttttaagtccttctcatctagctgtaactatcccttccatttccctatcctagggagatttatccatcagcatctagcctcttactctacactgaacctctgcagttctacaggttgaaacattgctatcattgtcctaactacatacaagtgaaatagatatcacatttgtgtttttggttctggagaaccccactcaggatatttttctaaccagatccatttacctgaaaatgtcatgatttcactttttaatgtctaatatattccattgtgtaaatataccatattttctttatccattcatctgctgatggacatctatgttgtttccagtttctggctgtcacgaatagattagcaatgaacatggatgagtaaatgcctctgtggtaggatgaagcatcctgtggatatatgcctaaaagtcgtcattggcatttctattgctatgaaaaacaccatgattaaaagcaagttgggaaggagagggtttatttgacttaaacttacacattgtagtccatcattgaaggaagacatgagaggaacccaaacaaggcaggagccaggaggcagaacctaatgcaaaggcaatggaaaggtgtggcttactggcttgcccagcatagactgctcagcctggcctgctcagcttgctttcttatagaacccacgaccaccatcgcagggaaatgtatcattttgattggtgggcctttctccattaatcaataattaagaaaatgccctacagctggatcttatgagccattttctcaattgaagttccctcctttccgttaagtctagcttgtgtcatgttgacataaaactgtctagcacaagtggtatagctggattttgaggtggactgattcccatcttcatgagtaactagcacactggtttccttaatggctaggcaaggttgcattcccaccagcagtggattagttattcctcttcttctgatctttgtgaaaatgagctgtcatttgtcttattatcttaccattccaataggtataagatgaaatctcaaattattacaaaaccttaagctttaacaagcactcaagattagttgtaggtgtctttctaggactggaatagctctgtgactttttaaacaaaggaacgtctcttgtcaatacaactgagaaactccccaatgacttcatcatgtgttatagttccttgcttagaaagtcaaagccatcattcctcacagttttgtaggactttctaaacattctgatttggcttatactagtgaaacttccaattacatctcatgagaagacaagagaagacagagatctttagggcctttaaaggtaaggatgcacatgtttattgttcagaaactgaagataaatttaggggacacaaatttcataaacagagaattagcatattttatttctaaaaacccttttagaccacacaatttattgattatttttatttttaagtgatagttaatttttaagaattaaaaataaaacatatcatttgaacttgagagatggctctgtgggtacagtgtttgcttaacaattatgaagaccagaattcagatgcccagagcccatgtaaaattagtacattaattgcttgtgtctgtaaccccagagatggtaggcaggaatgggaagatccttggggtttcttggaattcttataaactagaatagcaattcaacaaagagactgtgggtcaaaatgcaagggagttcatgatagaggaagatttccaaaatctacctctgatctccgcaggctcctatccaggtaactgaacatcccccacctcacatacaaaaatcataaaaagaaaaaatgttttaagtatgcacatatttatgactcatctgtgcttatgctttttggggatgtcaatccctaaatacatcagtaaatgtcctatctgaagagtgagactcttagcctctgtttcttttctctctataacattactactctgtaaacttgataatttcttatactgagctaaaaactagaaaccatatgttgcctcgttcacaggctttctggctgagtatttttatttgtttatttttaattttgatttgttttttgattttttaatagatagcaaagaatattgtcaagttttcttactaatctgtgtccagtatcacttaagatgcccacattttcacaagaaactcccagggatggtctttgggaggattatagaccccaagcctgaagtctctgaatctctggatgttctatagttcatgagactgagcagcaacctaatgcattcccgaggaaatacagaaattggtctttttcccagtatcccaaggaatgagtacacattccttaagtgtactaggaaattcatctctctgacaacccagagaaagaaatcaaacaggctcctctggtatgttctttacttaatgactaaacatttttaggcaattttgtgtgtttttcaaaaaatatcttcagagtcagagaaaaaaatgactgcagtaatcagaggtagatgactcattaggacttgtgctctgcaatatttgaggtcacataactttaaacaaaacaattactttgggtcccatgaggaaatatgcctcactacttatgacatgcatgtgtcctggttaagtgacaataaaaaccaatttgacacacactacagtcacctgagagaaaagcctccaatgaggaatttcctacatcagaatggccaagtgcatgtctgtaaaggattgtcttgattgttcaattaggaaagcacaactcatacttagaagctcaagtactgggcaggtggttctgtgctgtattaacaaaagccacataaagttgaacatgtgaaagaaccagagagtgagccaacaaacagcattccctggtggtttctgcttcagttcttgccttgggctcctgccttgtctttcctcaatgataagttgagaccttgaagtgaaagataaaataagcacttcctgccttttagacacttttagagtacttcatatcagcagcagaaatggaaatgagatcagcagggaattctaaacccttgctgttcagtgtttttccatacaactaatgtgcttctcctgagagcttcaagaaaatgaaccatctcacatgagaacaaacaaacttcccaggggatctgttttgatatttgcatttgtgatatttctctgaatcaaggaattacccatgagaatggctgatcaaataggctccaaaaacagaattcactctaccatgttgacctactgcacattagatgacaatttccaccacaggagaatgaatccattttacctcactgacaacaaaagttcttatgaaccagacaaactcaaggcaaacattctgccggcaatgcatttttaaaacattaaatgatgttttccttttgctttgtagtcttggatgttgttaaaccctagggcaaaacacctcaatgaaaattttcataggtaaatatggctgtgtgtgtgtgtgtgtgtgtatgcatacatacaagtatatagacacatatactatttttgttgttgttgtttttcaagacagggtttctccgtattgctttggagactgttctggaactctatctgtagactcacagagatccacttgcttctgccttctgagtgctgggattaaaggcgtgagtcaccaatgcctggctaaaatttttatgatatttttctgagaaataatgatatgtgtctgtgcaaagaggcttataaacaaagaaacattaatcatctattaccagactgggatttaatagctcaagagattttgagttacctcatgaactttgacaatgctgaattagccagctcacactgtctaataaaataacgctgtgtgactttcagaaggtaatacatgatacattaattttcctttatttctgatggctgaattgtgagttataggatccatcatgatccttggcagaaatgaagagaaaggtagggtgctaggggaatcacataaccaaagattgatgcctagtcatgatttaagtgtgatatgttctgtacttgttctccagctggtgttattctttgggggaagttatgagaactttgagaaatagagacctgactgatgcgaagcgtgtttgtgttagtctttaatgatatagtccaatctgggtctagtgtagtgtttttgcttcctggtatgttattcgtggaagtcccaggcatattctcatgatattaggaatctgctgtgctatacttcccttgtcaggataagcttcatgtcttcaagccatggggctcttccattctgttgaatcttcaggtatttggtttcaaatatgaaaaaaatccctctcttcttcttacagcctcattcaatatcattgtctctccaaagtccttaagttcaatatgattgcatggaatattagggctccaataccaacaattaatgaggtaatttagtgtgtagtaaccatgaagctacatacagaaatcagaataaccaaactaataggaagtactggaaaaatcaaataaaagttcattttatttaataaaattattaaattagttgataaaatacctccttatattcctccctcaacccagaattagaaataaaataatatagatttagatgtggacatattataaaagttatttttacttaaatactcgtctattgttttctagttctattatattttctttaagctaataagtctattagaatatatgttttgagcactgtaagttttttatagttcctttcaaactgttttcttttatttttaagattataatacaatagcgttatttctccattccctttcctccctccaaacttcctatatatgccacttactctctttaaaatcattggcctctcctttcattaattgctattagaaacctatatgtatgtgtataaaaatatatattccatatacaaactactcagtttgaataatgtttcatgtatgaatgcattcagggcttaccactgagttttggataaacagttgtacttttccctaaggaagactgtttctccttctctgggcatttctgagttgcctgtagttctttgtgtcgggttaagtgcctgtgaactttttcctgttcagtatgtctattggtgccatccttattcaactcatatttaacagccagacatgagattttatgtgtgtaagtgtgtacatttttatgagacataatgtacagcttctgacattactaggagaaacaatttacagcaaaatccctggtcctctgcctcttgcatatttctgtccccacttgaacaatattccctgaatcttaggtaggagctgtctccattgggactagggacttttcaactcttcttattgattgattgtagtttcctatagtggtcttcccctgtagcaaagagaagtttctttgatgaggggtaagaattccagttacctatgtgtgtaaggacaaaatattgagattgctgttggagattatgctggtttcgtaaagtagagattgtatattctccttcaataactatgactttactagcactgaggagttaactatgtttctagtaccttctagttcaaggagtcttaaatccaattagagaactgtttgataccatcagtgtatgaatgctactgttgttttcttaagtcataaaatatgttcactaagaaaaaagaaagcattgttgatttcacctttattccttaaaatacacttcaaatgcaaacagtaaaacaatccagaatgcacccagctgttcagctataattatgactgttgtcataggaactacacctgtataagaattcaatacaaggtattatagttttgattttgcaagtaagatatcttatttactcatggataaaatagaataaatttcatatattgttttaaaattcttcaaagtgttatctgtctggttttgagaacaacatgatcatggaaaataatctcaaaagtcttcttaagtacccatgttgcttgtttttctttatgcatttgttatatgtgacagtcttagtgtttctattgctgtgaaagagacaccatgaacatggcaactcttataaaagaaaatatttaattggggctgtcttacaggttcagaggtttagtccattattgtcgtagcaggaagcatggtggctcataggcagacatggcactggagaggtagctgagatttccacatcaggaggggcaagcagcaggaagggctagagagacacaggatttgccttgggaatttgaaattcgaaaggctgccagcctcctagtaacacacttcctctaaaaaaaatctaccccttcttcaacaaggctacaccttctaatgcctctccctaagctttcagatatgagtctatgggggcaattcttattcaaacaaccacagagactgtccaatgtaaaattggacagtcttgaatacaagtactgtcctaagcatcttggtccatatatgtttaaagttttcattacacaagtccttacactgaaaaaagtgaagatgacatggcttcaaatacattatgcccagtgcattacacgaaggaagtctctgtagcacactgaactcaatgcggacaggattaaaatgcatgactgaaagggctaagagacctgctacagtccctattcagggtcccaaagttgaaatcctgcttaggagcaaaggagggtaaaagatttctataggcaacaatctgagggtcatgctctttatttcatgtgatctttattgttctgtttctcctccaaaattattttcctacttctaacttctccattcttctagattcctctattctaaaaccttttcttcttcaggagccttgaagtgataaagaaatttctctcattgttcaaaagcacatccaagaacaagagataaggagctgagccatttaccaggacaacacaagtttccaagcccataagaactaaaccattaccagaaaggggagggcatagtacccaatggcaactttaagacaaggacctattgttagtagactgacaaatgaataattggcatgctatttttagtaacattggtggatatgtgtgactctgatcttgtgcaagctgtaaagattttatttgtgtgttttttgtttgtttgtttgttatacaaaaagtctttagtctagtttaacttgctctgaggtgacagtgaactaattgtgtgtagtagtctgagcaagagatcaaggcaggatgttaagagtacaaggtccttgtgggacaaatagatcctgttatgaggcatgtctcagtatacattctaaatatcaaaactgtgtagttaaatgaaaagacatcctccagaccatcacagagtatgtgcccagtaaacaattaacacagtgttaattttatcagcttctataatgtttagttactgagacagccatgaaaatgactgtggtatactttcccaattcactctgttggcacttatctatctcactcaaaaaacctcagtttttgttttaagttatttaagaagaactaagcatttaagggtatggtaacatttgataactgtcgattatttttagtgtgttaaaatttagatttttctgggccatatggaagttgaacctgacaagtcttttgataagatttgaatatatcagagagaaaatggaggaggaatagatctagggaagaggggaagggtggggacaagggaggaatggagggtggtgaaactgtggttggcatgtgttgaaaacaaaattaaagacctctctgccacatacacaaacaccctcttctccttaagagttatagaaagctcacctttcaaagcagaatgtccatgaggtctgatatttagcgtccttcatgtgttataaatatttgtttttgtatttatagatgtatgtatttatttattagtggatttacctgtgagagggtttgaacaaatataaacactgtgtgagcaggccagaagaaggcacagggtatcttcagaattatcctcttgtacatgcccattcagcaagcctcagcaaatctcttatctcaaccctacatggagctggggctaaagacatttgtgtggatgtcttcttcattatttacatgctgggatctgtattctggctcttctgattatggagcaagtgctcttaacaaatgagccatttcttccttccctgtacaaccatttaaaagaatgggcataaatagaaattgaaagtgcagggcaaaatacatgattttctgttctcagttattggaaaaactgttggctttctagtcacattctggacgatgtttatcaatcactcataaaggggctttggcattatctgagatctcagctataaatataaaaaatgaccaggggtttaaatcagcccaaagtttcctaacccatatttctggtacctacttacttatcctgctttgttgttcctttagtcatacacttcataaatactctctttcttccccttcaccatgctcatccttgttcctttttgttttcctcaggtgagcaatcttcactttcccccatggaaactgtgagtagtgaatgatgtcaatgccagtcttctgctgagttatgggtctcactgtggaaaaacctatactcagaatatggaaaatcactagatgataatgtgacttatttggagaaagaggcttatgatttcaatatggacatcattagcaggatattctaagcacttgccacacatgccattgatagaaatgtgaagaactgccttttcatttgcttgattctgtttagtataaggaaggctttgagatttcactaattgtagttttcacttcccatctacacaggcttgtaaatgcatttcccggatatttttgtccaattagaaatcagttaatttcaatgtagtatccacttattgttatatccactactttctccaactccctactgtgacaaggacattaaaaggcttataacattttgtccacgagacctgactatactcccacatacaaaatcaatttccaaaatgaaaaaactcacttgcacatgaattaatcaaattcttgttctgttctgtgaaacacaatgaggctcagaagacagagtacaatgtttaccctcatgtcttatgtataaatttacataatacaaaattggatattttattctctatcattttagctaccaattagtaaaaagaaagcattaatgttaaaagtattccttctccttttactcaaagtcttgttttaatataacccatgaaaataaaatgaaggagaggggaagaaggctcagaaagaaaggtgcttgtgagaacatgagtttaaactcatgaacccatgaacaaataggccagcatggtggcatgcatttaagataccagctctgtgaatgtggaaactcttgaggcagccagactagcataattggtttgtttttgaattttaggaacttgtctccaaaaggggaaagggggacagtgtcttaattgtctcctagcctcctcacacatgcacgtgtgtgcacaagctacacaaacagatacaaaaattttcaattaatcaaaggaagattaacaccagccttggctgtcctggaattccttctgtagaccatactggacttgaactcagagatccacctgccttttcctcctaagtgttgggactaaaggcatgcaccagcacaacctggcccagcttacagtttttttaaattttatgtgcatttgtattttgccatcagtatcctgtctcctggaactggagttagacagttgtgagctgccaggtcggtgctaggaattgaacctgcatcttcctgaaaagcagtcagtgctcttaactactgaacaatctttctgccctccaccccagtttatgattttgaaaataacatgcaaatgactttttctttttactctaaagggcattgttggtggaggtttaaaacatctgatttgttatgttttcttagctcagggaataatacctgctgtcattctaccatggtcctcgactttgctagtttagaggcaataatattgagagtcctatgagaattgatatagaagattatacacagagtaggcaatagcaggaacagagtgctgtgacctgaaatgctgagatttggcaaaacatccagtagccacacctctgtaaagcaagtgcaatctatagtagattccactttgtgctgtagaagcatggataagaaacaaaatcaaggcaaagaagcaatagttcttattagtctgataatcaagagaggtcctataacttagacctacaaaggtatcacccctctattttcaataactcattttcttatggaaccaaattaaatacatttataattgataaaataaaaacaatgagtctgcaaaatgagtgtttcactttatttagatgtgatttgcttttgtatatgtaaactcacatttcattactttaagtaaggcttacagttatgaatgattattcctacagacaaacagaaatcttggtttctttatacattttgttagtgcctaagctaacccaggaaatagtacaccagcatttttgcatgcccagtagcaaccagagtctcagtttaatcagaaactatcattattttgtacataatatatatgtaactttccaaaacatcgtctgttttacaaaataaaaagctgcattcttcagcattcctctgttattgaaagaagcaatagcagatcatttgagagccaggtgtggtatgattttaatataggtgtttatatttatttgcctttgatatagaaacaatctcttgaggaaatcattcatttgatttactaatattacaaaagccacacaaccttctcctgacatttttattttcccatttcaaaattatattgcttttggagactatttgattcctgtgttttgtcaggtatgagctttgatgtgtattttccttaccagcatttgaaaatgaggaaaagagaacttggttctcttcaggacaatctttaagaaccaggttgtagttctccatgctttctctgccacagttcctgcagtgttggcaccaggactctgcccagcacaggttctagcatgaagagagtatagtgtggaaacagcattcattggcagcagagagcagaccctttcttggcagtggtattcaggcagggtccttctgagatacctgtgtattattgtgccatgatttgactcggagagtcagtgtcttttaagaaaagtagacctgaagcaaaaatctacgatgtttagggaaaaaagggacattgaaaagtgctaatgagctttatatcactcaagaaataaccaagaaaaaagccaagatttagctaatatcctttactatacatctactgttttatgcattttactataatcattatttatacctttagattgttttgatatgcccctattcaacaaacatgtagtgaaattctgctgaattcttgtaaataaactagtaggtaaattgttcaaggcatagagattctaacaatgaggaggggccatataaatgttcttaccaggaaagaatagaaaatacaagtattattaaaatatggggaaagagaaatccttcattctgatgagggaacaagagggcacaatagtcaccctgaaaatgaaagaagaatttgagggataaaaggcagtgaaccaaaaagttacacagccattataaaagaggaactgtagttaatatctacagcctgtctcaggaatttcaattttctcatgcaccagatattgtttgaaggaaagcattataagataatacttgatagacaatgtggcctagagtctctgtcaggaagcactccatatttgggaattctcatcatgtatcatcttctatatacctccttttattttattagcaaggtcagcacaggaatcagacagggtcattaatttttcaaccaagaccatgattagtatcctttgaaaatgattctatgtatgttgtttctgtgggaaatagtaaacatggggatttgtttcaatgctgataatcaaaactctaaagctagcagtcactttttccaattagaaaattgagacatattgaaagttaatggcagtgatattttcagaaagttcaagagaactgaaactacataggaaagcaccaacccaaatctacaataacagaagaatgacatcacaactgacatgcctaaatttatgattttcagatggcacatttatggtatgcatttagtaaaaacattatgcttgaatttcatgttgtgatcttttttggggcttgtattgtaaggtgtgatgttctcttgaaaatagccacagcatcaaacccactcttccccctcacacaaacaatatggggggggggacaacctacactctttctattctgcaggtaatctgggatgttatgtaagtcgcatatgttaaccacaattttcactttgtgtagtgtcagtttatgagttatggatatgactccatcctacataaataagtattcatacaaagagtcaaatggacatctatctaaatgaatcagaaattgggtgactcttagagtgcaaggaatgtttaaattgacatgctgattcaatactggaagtagactgatactttccaacccttaaataaatcttgagttgtttctgggatttagacccagaatctcacccatatgtcatcatgaagacacttaattttgggtcttttgttatctaaaaacaaaacaaaaatcatcactgtttaacacttaagtaaaaaagattacaagcctgatgattctggtacctgcaaagtacagaccagcataaagccagcatctgaggaaaggccttcctttgaatgtgttgaaacaagacagagcagcaacacattgaaaattcccttatggaaaggtgtcatgctcacagagtgggtttatattataaaaatccttggccataaaatcaaatgcatccttaggagttccagcccattcagtgagcatagcaacatcccattaacctcatggactccacatttggtgtaatattaaaacactgttcatcaagataccaatatgtgagtcctcaagaggcacaaccattcctcgagcaaaccacatcagtgtcatgaaagctttcttaaggtctggcaagggaagtgtaaaacaactcaaaatattctcagacaaagcctgcattcttagcctccaggaaaaagaaactcatttactcaacttaagctcttctttccatattctttcacatgagcagacaaaatccttactgaaattcagtggcataggtccactacaagtaaagagttttttcttctaagatatcaaactttaactcattaatgttttaccttcataccaacagctgttattacaatagtatttgaatgagctataataaacagagggtttaaagagacagaaatggtggagttggaaaaaagttgtgtgtgtgtgtgtgtgtgtgtgtctgtgtgtctgtgtgtctgtgtgtgtgagagagagagagagagagacagagagagacagagacagagacagagagagacagagagagaaagagagagagagtttgtgatttacatgaagaaatgaacagggaagatgactgtaacaaagcatttaaggacttaaagtaatttaaagtgggataacacctatgccactgcaatagcaaaaaaaaaaaagcaaaaacaaaaaactaagagagaacagaatagaatagaagaaaatgatggtagctatttttttaaatgtgtaataagtaccaaaattccaattcaagatgctcaaagaatacccagtgaagtggagagcaaaatattaagtcagactaaaaaaattacttggacctggggaggtagctcagtcagttaagcacttgtcaacaaatataagaacatgagttctatacccagcacccatttaattgttttcactttgttatcttctctctatgtacattgtaatgtatgaatgaacatacttgcatacacccgtaagcatgtttaaacacaaacacataaaatgcactttggcatatgagtgaagccagtttggaaagtctatattttgcataatatattggttttgaggtaggaaaatttagaacgatgaagcttagaaattttagtataacaaaaaatgattctgtgcaacactgtatgtatggaatcactatatacctattaaaacaattaataatccataagatacaatgcacagacatacacggttttaaaaagaggatagttatgagcggtagaatgtatgtctcagggaagaataaatataatagattctgggaggagacttggggtgggtgggatggaagtgggagatgtcaggtcataggagggggagggatggagggaaagagttctgagaaagacaggtggaatttgggaggtgatgtggaaacctagttcagtgacaactgcctagaatctacgaatgtggccctagtgaggactcctagctatggagggtatagagtctgaactggccatttttgtaggcaatcaagagttcctgtagtgagactgggatttattgaccagggaggtcctgtgaaaatacccattcaaactagcctaatgctagggcagaaggtcagtctcagcgggtcccattgctgaggacaactttcacacagctcattgaacacagatcaagatggtgcagatttggaaccctcaccctatgttctagtctctttggcataagaggtactttgtaggctatgggaagagaaacctcaacactaaaccagacacaaaacaattcacctacaaaatgttctgcctgcaagatgtgtttggaaaatggttacagaacttgtgggagtggccaataaatgatgagtttaatcttaggttcgtgccaggagaagcccatatactacactgcctggggggggcaggaaacagaggctgaataagccagagacaggatttgtgccatgtccagtcaccatgagagaggcttccttttgcagcagatgggatagacatagagattcacagccagacactattcagagggagactccaaacttaaggttcccattgggttcctcacctcagagattggagtaccccagggaagccagggatgaaagacagtaggaatcagaggaatgggcaacaccaggagaatatggcccactaaatcatctaagcaggcccacatgggttcaaagattgaaacagcaagcaggggctccaagggccttcactaggttctctctgtgtatatgctatggctgttagtttggtggatttttttgtcagactactaccagtgggattatataccaattagatatattatcattggaagcaggggtatctctcattctattgctggctcttgagactcttttgttcctactgggttgtgatatgaatgagtttaccttgtcttattgtatcttgttttaccctgtttggccttagtatattggaggcctggtcttttctgaagacaaaatggcggtggaacagaccttggggagtggggtggtggaggggaggatctgggaggggtggagggaggcgaaactgtggttggggggtattgtatgagaggagaatctgttttcagttataaaacaagtgtcatttctagaaggaagagtgaacctcagtatatacacattttcaaaaataatagatgagtaataccagtattcagactataaaaataacattaatacatttatttatggtttcattgaagtggatagtaagaaatattattgataaaattgcttcagaagttagtggatgttaaaaaaataaatgtaaaaagaattgaaaataaacactatggtcctggttatggtgttttttacagtgagtttatagttatcagtattcatcatttaagtcagaaaatgtcagatggtaaaaggcaattttttttctaaaggagtgagcagagaagtgagcagaagatgttagaaagatcaatgcattcatagattgcagattgatctgtcagggctcacttgtagatccagaagtttgcatgctgacatgtttagagatctgtgtatcatacaaacaaatgcaagcattagttctgttatccctctttagaaggactgttatcaattcatcagtagcaatgagcatacttggcatccgtatctcagttcatcaatattctccacaaacagaagtggatttccatggataagtagctgatttgtgggaaggagaataaatgagatgaattgaaaacatattttactgtgagagcatataaatgacattagaaacaatttacatccagtgtattttttgaaagagacaggaatctatataagtgtcctgagtagtagaaactggaataaacagaataactaaatggttggtgttgttttatagtacgaagaacgaaataatggataccatagttctcactgttataaatatattattgaactggtcagtggttggagaagacaaggagtatctactgcagaagaaggccaaatgattcataaggctactaagctcttttgaggacaggtatagttcttgatgcttaactaaggattgagatttgatttcataaaacacaacaaggaaaaagttgactttatggaggctaacataatatgtttaactgaaggcaggtgatcaagttaaaactcagtgtcatgaatgtgtaatgtaatgtaatttaagatgacaccttttctctatgaactttatctgctatcccatgtttaacatgctttaatccatgcaaaagtatactataaatcctaatatggaaacattctacaaagtacccagcaaggacttctaaaatctatgaatgacatcaaaatcaaggacagtctgaatcacagtcgcagccctgcgacagcgaagaagccctgataaatcacagccattgggtttactaaatcatgtgctagaacagaagatgacattgacattaattatggtaaggaaataagaatatagatttgagttaataatgcacagttttcttgactataataattacagcacactaatataaggtgtgtataataggaattatctaaatttatcctagacataatccctactaaacttaaaatgttatttgtggttgataaaagcataacatcctcagtgtccaaggcaaaataatgcttcaataaattttgctttttttacatctatatgaaaataagaccatgtctatgtttcttatgtttggcttatttctctagaaaatggccatcctgatttatttatgacattacaatgaaacagcttctcttattaaaatggttagtattctatttttcaacatctctagaaatggatacattgctttcatatccctgtatcttggtcattgtgagtaacattaacaacagtgatgcagtgatctctgagatactgtcttaaattgcaaatgtgaacagaaatagggtttctgggttgcatggtacatcttaatttttccgaattatcattccatttcaacatcaagaatgtgtaattttttcatagccttgctggcatttgtattaacgtcagtttcatcctggtactaaaatgtatacatcaaggtgtgcaagacatggcatactttacattttcttggagattatttggactgataatcatttcatatgccttttagtcaatcaaaatatttctttgagaaaacaagaaatcttctttgcctctcctcttccacttctgaggaattgaggtggaaaatatttcactgatacatctgtatcctcatttactgattccaattcaccaacattttactcagaaattgaaacacctatcaaattcccacactgaaattcaaaaaccatcctttacaggcaccctttctcctagcactgtgttgccagaagagatggtatcagttaaaatacaggcctgtatatccctgcttaatatcctatgacattatttatcttcttagtgttatttattattgtactattattcctcaatttcacactgatgaaattttattttttaaagagaaaacaaaagctgcaaaacacaaaacaaagggaattatgagcacctgatgtaaagtgatgccttaaaaattatttttggagaaggcctaaaaaatggccatagtagactattcaataaaaaaaaaatcaggaaatgtttctgtgggtttctccagtctggtcttgacccctttgctcatgactccttcctctctgcaactggattccagatttcagctcaatgttttgttgtgggtgtctgcatctgcttccatcagctactggatgaaggcactaagatggcatataaggtagtcatcaatctcattattggagaaaggcatttaaggtagcctcttggctacttatattgttagttgggggtcaaccttgtagatctcaggacattctgatagctgggaaaccagcataggactgttccagacaatctgaaggaggaagtcagtttggaagtctgggcaatctatggggccactggtagtgggtcagtatttacccctggtacacaaatggactttgggagccctctccacatagagggatatctcagcctagacacactggggagggtctaggccctgatccaaatgatatgacagatttgaagatccccatggaatgcctcaccctccctggggagcagaaagggtttggggtagggggcaggggaggaaaggagagagagagaactgagtttgacatgtaaaagaagcttgcttctaatttaaataaaaaatcaaaatcaggaaatggacatgcattggcactgaggaggttacgagcaaggggctaatctcttcagcactgtgttgttttcaacaagaatttttaatactgctaaattctacggtgatcttgggtgaaatagacccctctttttcagtaactttggggaatgtaattaaaatttagtttctacattgacgtcttcatatgcaatatcaacttatacagataagttttatttttctgcacgtatgtactgatacttatttagagctattcaaccatgaagaaaaaaatggtaaatttatgactaacatagctgcatgatatgacagatttgaagatccccatggaaggcctcaccctccctggggagcagaaagggtttggggtagggggcaggggaggaagggagagagtactatatatagtactgattatttactaatgcattgaaaacatattcatttagtaacataaaatacaaccttattgctcaccactctgagaagttgaatttgtctccaggatgaactgaccttcatctcagcaaatgtcaggctttaactaacagataattatgggcctaatattagtctgttctttataaaaaaaaaaaaaaaaacagtaacatgttttctctctacctttatgatttgatacatgttaaataaataattatatgaatttgatacctgggagctataacaaaatggaaactacatgtcaatattatttatgtaaaaaattttaaaaggtcacttttatgctatgagacttatttgaagcaaaatataaagacaggttacatttatacttttaacattaggaaaattcaagtaaaggggctttgtctataggcaaacaggctttgcatagaaaaccactagtaatgttgatatctaaattgtattttgtatttcaggcatttaatgtcataaatattctttgtgcagataggtttaatgaagaagcccacttgttgttcatacaacaactagtccagataccctgaagtgaattgtgtgtgtttattagatttttctcaaatcttctactgctttactgacaatgaatatacctttttaaaaacgaagtatatgagtcacttttctttaccttaaaacgttattgagtgacttccaccaggaattaaagaataaaattctttaaaatctgtgtaatatttattttaaaattgttattatctgttcctttgttggtttcacaaaatttcctagaaagtagttaatcctctagctactaggacataaatatcaatgttcactaagttaatgtgggatcaagggccacatataaaatgcatgatttctggttagtcttttaaagattatttccattataagtacaattttaaaactaccgggtggtgattttataatttccgagttttactgatttcaggaaattgttttatctagatgtttaaatgattttcaaaattttcttcttcttatttatgtgatgcttctacctgtgtgtctggttatgtaccatatacatatgcatgtgcccatgaaagtgagtagagggtgtcagattccctggagttgtagttacaagaggctgtgaaccacttgatgtgagtgtgggatttcagctcaggtcctctggaagatcaacaggtactattactggctgagccatctctccagccccaggttattgtttattatattttgtcacaatttcacaatgtactgtcatttgaaatgttaacatttttatgcctcatttgtttttggttgacataccaatcttgtattattaaatctgttagatatttccagaagacacatactttacatgatattaaaatttccatatgagcttaaatttgaaaatgacttatatttatactttgtttaataatcattgaaacattttgacaagtttctttaaaaatgtgaatctatggttatcaaaatatacacatttttatgtaattctatcttacccccaagattcataatcctaatattttatttccttctctatttaattaatacgttttctaatgtttaattttaaacaaaatgttgtgctaataagacatggctcaaatggtcaaagagatgccagtcaatcatgagcagctgagttcaagcccaaaaggtctggtgaaaattttgtcctttatctttatcagcagagggaagtggtggagacaaaagcatagttggagctcaatggcaagccatggccacattggtctctcagcttcagtgcgagactttgattcaaaattaaaacagagagcaattgaggaagacaaaagacattgtatctggcttccacaggagtgtgtatacatgtacacacacatcttcatgcacacaagcacacacagatacatttaacattcatgcacatgcaaataaaagtaagataaaagttattaaattaaaaaagacttctttaagccaggcgttggtggtacacgcctttaataccagcactcgggaggcagaggcagactgtgagtttgaggccagcctggtctccagagcgagtgccaggataggctccaaagctacacagagaaaccctgtctcgaaaaaaaaaaaaagacatctttaaaagatacatcttagaaaatcttctattgctacttttattatttaaattggacatcatttttgttcaattcattacgtagatatgaaataaagtttcactaaagtagtaggggagaatgagggaatgaggtatgaaaagctttaaaaagagattaaggaaattctgatttttatggagggttaaaacagaaatggaggctactttttatgccaccctagagccctcatacagtggctgatggaagcagaggcagatacccacagatatgcactgaactaaactcgggaacccagttgcagagagggaggaatgaagatcaaagaggtcgggaccagtctagtgaaatccacagaaacaacttgcctgaacaagggggagcacatggaccccagactgctgcctgggaggactgaaccagacccctgaacatggatgtcaatgagaaggccttcacactctatggggcccctggtattggatcagtatttttttcctggtgtaagaagggactttgagaccccatcccaagtgaagggttgctctctcggcctggacaaatggtggtgaaacaagcttgttcctaatttgaactaataaaaaaattatacctttttggaagaaaaaaagtctgtattataatgtactgctttataagctaatgaaaatgtaatttaaaaaagtgcatgccaaggagttatttttttgcagatgagcgattctcccataagttacaggtatttttaatgcaattgcagatatgggatactccctatgaaattctgtccagaaagcctggaggcgcccaagaccatgtagatattgctactgttccttgtctcccataagaaatgaatgataagaccccattactgaagacagcattaaacctgtttataggacacagataaatgaagctggcactgacccggaagctgtcttcctggtagctagttttccttattccagaggatgctatgaaggctactttgggagaaagctcatcaatgtctcacccagatgtggactctacacggtacagactgacctgccatgaaaaatatacccaaagctgcaattaggatatgaatctttgggagataatcagtttcttttagatttgtgtcccactttatagcaaagagtgcgaactgagaagtcaaacctactgaaaagtcttctggggaggggaggttccataaagaaacctactactattactttgttaagtgaaagcttattaggatttttgtctaaatatttatatttataccacagactggtgctgctgcaggctcaggacagggaatcttttgcaatgattgatggttaatagagaaactcacatctggccaaagtgctgaaaataagtgactactgagtgattatccctaaatgggagctctatatcatcccctttaagactgagaaaacagtaataaggaaggggcaggaagaatttaagagccaaaaaatggagaggagtgttgagacacactgccttctaacagtggccattgtactcacaagcacacagctgccaagagacctggacaggatttgcagaagatcaggccctacaagattgtcatgaatgagagagaattacatggtacactgtttctttctgagaagatactggcattaatgcttgccaatgtgtgcacaatttccttcagtaactctactaatgtttgtaccagtaaccctgattaaagtctgtgggccaaaagagaaaaggacatatagaaaactcatacatatctttctcattgaaagataaccatgtgcatgacaataaatcaagtgctatctaatgttttaagtttgaagaaatgagagaattaatttgtcataaaatatctacattcgtgacaagaaacattgcttttataaagtttcattggttattctgtatgaaattactataaattctttattcaagaactaccataaatttactaatctaccaccaagatatttgaaactattctgaactctaacctatataatcctttagtaattgattagtatttctttttgtttcctgattacagcttccctccctttattcctcccatctggatccagtccattctgtttctcatttaaaaaagagcaggcttctgagctggatgtgggtctctgcatgtttccatctgcttcaggaggaagctgtttatgatgaaggctgaataaggcacttatctatgagcacaacagaacatcatgaggagtcatttgatcactactttatttcaagaccagtaatacttgattttaccctaggtaactgggctatttaatctctggttcttgttcactctaggagtatcatgcttgggttccatctcatggaatgggctttagccaaatcaaatacttgttggttactcttacaatttctttgccactatcaccgtagcatatcttgcatgccaaacagattgtgggtcaaagctttttttttttttttttttgactcagttggtgtttatgtttatgtttattttcttttttctttttttttggtgtgtgtgtgggtagcctgcagactgcccagacctaagacactaaaatgtattgacaaaggctgcataaagggaccacattgacttctccatagttaatgatttgtgggagtattgtccttgacaatgggggacagctttcagtttgtagaggacagcccattgccttagtaacaccctgggtagtttggggatatcattgataccctcttgtttaacaactcagttgaatgcaatgcagtcccagtactggggcacctcatttggtgacaagaaatggccagtttagactttgtcactcccgttactaggaggcctcatttggatcaaattcacataatttaggcagtttccaatgtagtagctttccataccaccccgcagatacctctcaattcctgttgtctcttccagtattcctctacatcaaccctatctcccctctctctccatacctgaacctccctttaataactaaaaataaacaatatatgtttttgtatggttgataattaacagtaaccattttatgtcttaaatggatgattctttactaatataaactcggggagggctggtggctaacagcacttgttgcacaagactttgattcccagttctgaaccccatagcccacacaagagcagaattagctcatacatttatgatccttggcttgcttgggaggagatgagggatggggaaaggaataaagctccatgtcctggcccttgccctctgacttccacatatgtattgtgttccatgcatgtttgcaagcacacaaacttattccccctgctcctctttggaggggcttaatcgtggaacttcagttgatataaccctttgtccccaagctgctatatgtcagaaggtgaattttttattgttgtttttatcacagcagcagaaatagaacaatgggaggtattaaactctaaacatgattaaattgtaaatcacaatggagactcctatatatcataatagagcctttttagatatttgcttacttattcctttctgagaaagggtctttttggcctattcagagtcagcaccccacaacattcatgccattttacatgtgatgtgagagttattatttgaattagtcacatatgaattatcaagcattgctcattgtcttttgaaattattactttctcttcccagaagatgtataagcagtctccttagctcacagcagattgcacctcagctggcaccaacaaagccttcggagtcacaagggcttcagaaatgtttgtcaggtgagtaaaatgcaaacataaattggtatataacagctttactcacagaattaacaataatttatgaagtaaacacccatcagtcaaaactaaataggttacacatgtaattagaggtttttctatacctgattttgaagaataggaaatataacacctctcaaaggagaaaaaagaggatggccaactactttctctcaggtaacattgtgtgctatagaaatcacgtataggaaaaaaagaagaaatgttacctttcttcaagttaatttagggccagatctctccaattccaataaacacctgactcataacctacactggcatgacacagaaacaggttccaaaatcccaatcacaaatgtgtcacactctttagggatagactccaagtacctaagggacatgaatggtgtcaagaaaccaagaatggccagaagaatatttagaacaactacataaaagccatgggtgcctgaattaaggccatcagagttttggtaaacccaaagtttctacaaagttctgcaagtgcattattcctaggcacaattagtatgtttatatcatgtgggccataactagacaaataatttcatccatattcccaaagatcttagtcacagacaccaaagttaaagtcaaggctcaaaccaagacgcaagcatagttgcaagatgtaacttcatttcctccttccatttgccacatgctgcagagacaagagttctgtcttctgactacttgttacagaagtctggtgatctgtagttctgcttgaacaaataaatctgggatagaagaaaaaacaaagaactaaacatcttatacacacatctgtgcatatacatacacacacacacacacacacacacacacacacacatatatatatatatatacaaatatatacacagaaataacatatattattatatattatatataatatgtatatatatataaataatttgtgtacgtgaattttgtaagatgggcataaaaagaatgctttatcatacattaaaagactagaggcatataaacaaatgtgtatatacagttgtttataatcttagaaatcttagacctgaaccttgatatctagttatctttaaaataatcttatagatatttgtgtggattaaaacatcattgaaactaacgtcagctgcagtgacaaatccattagcttctaacataaatcttgtgaaaacttataccataattcttcactgggtaaggtcattttgttcattttgagaggctgaaagatttaaaacaaacagctaaaacctaagtcaactgaacaaagtttgtgactataacttctagttattcaaaattctatgcactcttttaaccttcctagtgaacatcaaattgcagacttttaagtaatgtaatagctcaataacttttacatttgcctcagctttttttctccctgattcaatccctaaaacatcttcttaaactgttttatttttgaaatgttatttgaaggatattaattctatggttaaatatttaatatgtccttattgcttcttcctatgccttttcctgttgccataataaaacaaaaacctgcccaagcagcttcatggggaaaaggtggtaggagctagaaaatgtaggccatattttgtctatacttgggaatattatattttcatgattaattgcccaaaattttactgcattttatcctgctgcattattggtaacgttcctttcctttccttgtacttttctgtgcatcgctgtttcttcttgaatgtgaatgggctgcttctgtttttcagttgaaagacaaagaaatctttctttacattccacttcagccccacacacttgactactatggcctatggtatagaacccagtattcacttatgtacaaacaaggcttccacttcccacagtcttctttagctactcaaaaccacagacctgagaagttcttgttgagcataaatcaagtctcctttgcagatctgtactgttttgtttgtggaggtactgctgataaaattcaaatctggctagtttgatgtatctgctccatgcaattggaaatgttgttgcaagatgactgtatttctctgtgtttaaaaacctacagaatatggcatttaaaatggtttaggggttttcttgacagtgagactcaactgctcctggcaataccaattacatctgagaggaagatgtacttcaaagaaactcatggtgtttgctttcaatatggcaagaatagtcatttgggcaagaaaccactcttgcctggactgtttgataaactggacatgcaggatacacaggaaagagactgctgaacttgatgggaaagtcctaaatggtatctacttcatggaaaagtctgacagacattctacagaactcagagaaaaatgactgacaaactgccaatgcaagcagacagtttaaaattttctgcttcattgagaagtcttccagactcacttcagtctatgggctgaagatggatactccaacgttacaaaggaactttgggtgactgtccaggccgagagatgtctctgtcaattctagagtttatataacatctttctgtggtctttggtggagttgaagacagatagcgttttagttttccttagttaggattaaagataagttacatataagattttagactcataaagataggatagatgatagaatattttctataagttttaccaaatgttaatggactaatgatggggaatgttcttctgggtatgtttgtcttattggttgatgaataaaactctattagccaatagaagaacaagataggtaggactaggatacaaggaggattctgggaagtgtaggcagagaggagtcatcatgtgatcccaggaagggatgtagctgggcagaaactagctaacatactggtctggaggtctgtacagacagtcaggacatgacttcgttgggcagaatcagtatataaacagggacaaacaggacattgctctcttctctgatgagatgctgagcagttgagatgtaggatgccagaggagaaacaggtcccgagacctttctccagtaagataagactgcacggaaatacttagattaatagaaacaggttaataattaagacagagctagccaaataagaagctcaattctctagccaacagttttataattaatatagcatctgtgtgcttcattggggcatagaggggtggcaggaccttgaaggtcaagaaaactcacattaaaacttttactacattttaagcctttattctctttagaaagtcaagaattgtgagcctctgctttaataattcaagtgactgaactaaggtatatggggaattaaaataaattcactttgaaattacatgaagtgtcattcgtggttttaaggaggggtaaaatgatggtagcaagtaatgccaatattggcctctgagttttactatttgttttacaaatattttcataaaaactaagctattcaacaattcaaatttaactaaaataatacaaaatatattcttgactgtcaagcattgactaatgattaacagaaactcctatatactcagaaattcaaaaattcaaataatgtgccagttagagaaaacattaaaagaaaatagaaacatatttaaattaataaaaatatagtaaatcaagttggttaaatatacttagactttctgtattgaaaacttataaaattatttatgaatataaaaataaagaaaatctgaaatgataatatctatgaaacaatgtagaaggaaaatcagaatgataggaaatattaatgctgaatacaagccattgctgaaagtaaaaactaaaaaggactaaagcctaagcatataagtgtacaagtttaatagaaaagatctccaccacataaacaagctgaaaaagaaaaaccacatgataatctcagtagatactgaaaatccaacaccccttcatgataaaggtattggagagatcaggaataacaggaacatacctaagcataaaaaaggcaatatacagcaaaccaacagccaacataaaactaaatggagagaaacacagtgattcctctaaaatcaggaacaagacaaggttgtccacttgctccatatctcttcaacattgtgcttgaagtccttgctagagcaataagaaaacaaaaggagatcaaggggatacaaaatggaaaggaagaagtcacactttcattatctgcagatattatgatagtttacataagtgacccaaagaattctaccaggaaactcctacagctgataaacaccttcagcaaagtggaaagatacaatttaacttaaaagaatcagagcccttctatatatagacaaaaagggggctgagaaagaaaccatagaaacatcacccttcacaataaccaccaccaacaaaaaatttcttggggtaactctaataaaacagttgaaagacctgcataacaagaacttttagtctttaaagaaagaattaaagaagatacccggaagtggaaagatttcccatgctcttagataggtaggatcaacatagtacatatggcaatcttaccaaaagcaatctaaagtttcaatgaaatccctaagaaaataccagcacaatacttcccagaccttgaatagataatactcaactttatatggaaaaacaacaaacccaggatagtccaaacaaccctttacaataaaggaacatctagaggtatcaccataagtgatttcaagctgtactatagagctatagtagtgaaaagagcttggtattggcacaaaaactgacaggtagagcaatggaatcaaatcaaaggccctgatattaacacacacacacacacacacacacacacacacacacacctatgaacacctgatttttgacaaagaagctaaagttatacaatggaaaaaagaaatcatcttcaactaatggtgctggcataaccgaatgtggacatgtagaagactgcagatagatccatatctattgccattagtcatgcacaaaacttaagtccaaatgaatcaaagacctcagccacactgaacctcttacaagagaaagtgggaggtacacttaaaagaattggtgcaggagacagcttcctgaacattacacaagtagcacagacactgagatccacaattataaatgggacctcctgaaactgagaagcttctgtaatgcaaaggacacagccaacaagacaaaaaggcagcctacagaatgggaaaagatcttcaccaaccccacagctgacagaggactgatttctaaaatataaaatgaacacaagaaagtagtcaccaaacaccaaaataatttgattatgtgggctacagaagtaaacagggaaatctcaataagggaatctaaaatggctggaagacatttaagaaattgctcaacattgttagccatcaggaaaatgccaatcaaaacatgtctgagataccttcttacacctgtcagaatggataaactcaaaaacagcaatggaagtttattctggagaggatgtggggaaaggggaacacacatccattgctggtggtagtgcaaacttgtacagccactttggaaatcattatggaggtttctcaggaagaggagaatcagtctacctcaagatccagcaattccactcttaggcatacacccaaaggattcaagttcatacaagaaggacatctgttcaactattttcatagcaacattgtgataaccagaacctggaagcaacctagatgcccctcaactgaagaatggataaagaaatcatggtacatttacacaatggagtactcagtggaaaaaaaaaaacaatggaatctttaaattagcaggcaaatggatggaatgagaagaaaccatcctaagtgatgtaacccagtcacagaaagacaaatatggtatgtactcctcacatattgatataagacatagagcaaaggattaccagactacaatcaacacctccagagaggctaggagataaggaggcccttaagagagacagacttggtcacatggtgaaggggcaagtgacaagagctcctgaacaaattgggatcatgcagataagggtgagaaaggtaagagaaagaggagggcagaagaggagagaggaggagagcaggatatgtcaggaagattgagtgaagatgaatactgaagaacaagaaaagagacatatcaattaaaggagccattatatgtttaaagagaaatctggcactaagaaattgtacagagatccacaaggatcaccccaactaggatcctaaacaatattggagaggtgaccttaattgctcttcccataaaataagattgaggactaccttaaatgccatcatagaccctttttccagtagctgatgggagcagaagcagatcacagctaaacactgagcagaattcctggaatccagttgtagagagggaaacacacagaaacagctgacctgaacaagtggaaattcatggacctcagtctgacaactggggaaccaacataggacccaaaccagtacacctgaatgtggatgtcagctaggaggactgggcagtctatgaggcctctgttagtggaaccaggaggtttccacagtttccaaaggacttggggagctcattccccatggagggatattccctcaccctagatacatggggtaaggcctaggccctgccccaaatgactccacagattttatgatccctcattgaaggcctcactcttcctggggagtgaatgggagatgagatgggggggtcggtgggaggtatgggaggatggaagggagtgggaactgggattgatatgaaaataagattgtttctaatttaaacaaaacttattttaaaaaagacttagactttgatattgctggatgttccatccatggaagttgtaattcaggagttggcattgagatgtaaccatccttgcaagtgtgcataattcacaatgtcagacttttgaagaagattttaatttgaactttcttgagtttgcagactttaaagtttcttttcattataaagaattccgtgctcttaagcttggccagttttctaaaagcttggattagtaaagagaacctggacaattatctggttcatactattttggtatatatctttctgcgtactatattactttatgaattagcagaaataaaagatgcctttagaaaaaaattctatgttttaaatctgcatagaattaagtgggtcaaataatggtgttttggtaagctgatgagactcagttacattcaaaatttgcagtgtatagaagcatacagacagaatagccaacattataaaggacagatgaacttatgagtagaaaataagacaatgaaagataaataaaaataagatcataatggaatattagttcatagtcattaatgatactaaaatcaaaagaatgatttcaccaaatgctggaagaatatgaagaaaatcgatcaattatcagtgggagattaaatgactgagcacagaggaaaattaactatttttttatttttcaagacagtgtttttctgtgttcctggaattgattctgtaaatgagcctggccttgaactcagagatctgcctgtctctgcctcttgagtgctgggattaaaggtatttaccacctaattctctctccctccccctctctcttctcctgtgtgtgtgtgtgtgtgtgtgtgtgtgtgtgtgtgtgtgtttgtgaaggagagagcaatttccatagtggccacaagagggcatctgattcaattcagctgaaattacaggttactgcaagcttgctggaaattgaacccaggtcctatggagagccgtgttcctagcacctaggtgtttaattttaattgtgttggtacttacagaatttacataagcaaaagcatgctaaaactaccatatgtggcatgtgatatcttagtccataataaatgaggaaaaaattggaaaaactcacatgaaagtgtatttaaatcatgtcctgccattattgaaattttgttagttgataactgttttaaggtgcaacatttttaaaagtattttgctggaattagaagacatttgtaataattagtaaaatgatgtcataataattggcagatgagtaaaatgtcttgtgtataaatattcgggactagaggtgtacacataagggactgtgcacattaaaatttagagagactgctatggggataaaataaattgatctacaagccacatatatagtgtaatggtgaaaacaaaagaaattaaaacctttctgtaatttgatgaaaagtgcatttcaaatcacaattaactatggcagcttggtatttattctaagttttctgtatgtcatgaaaggtacctggtcttatggcaaatatgtgttctgttcaaatatggcaaggctctgatttaagaagcctgtgagagcttatgtagggcacttcccatgcaggagagtaactgagtggggacatttgtaagtaattcctgattggttggtgcagaccacagagtactcaatggcactttgagatgctccccttatttacatttctgatatatgtcttaggaaatgcacaggtcagtagttcttctctgctctacccctaccaccacagttcttaggttgcaccctcagaaaagagcataaaattaatttacactaaacaacaaattaaaaagagctaaagaatagctgtggtctttgctatgacttaactgcttgatattgtgagcacattttaagaaaagtgtcttgaccttttaggggtttatatactttggctttgtgggtgtatttaaatcatttcaatatggtaattttttttacttttttcagtttatagtttgttaactctttttaacataatcaccaacagagtctataatttaattgaatgcatgggtggacattatacactctagtcaaataattggctggcttgagagattaaattgtgctgctgaaatttaacaattcgtagaatcatagaattttcattgttggttctaaaaagacaagtaggaagcttgcagatgagagaaactcccaagagcagtaaaaaggggtgttggtaggggtaaacacttagcagagtatttgaagtattctactgatacgaaaaattcaagagaagctactattagggttttaattagaaattgggcagatatgtaaagcattttatactctgaacccatgggaacgggctttccagcctattgtatgacaaatctacttaatacattagcaaattagatgtttcttagtaattacgtaggcatatcaaatgccttattttacctttctgaaggttttcttaagagaggagaaaaatattcattttctttgtttttcaatgccaagtgctgtaatatcactgcaactaattaaaagaaatactagattattttgaaaatgtagttctttgtatagacgaatatagagaaaataaagattaatggatgatggaactaattttgtttctactccccagcccttgcatttcctaaagtgttccaaaatactacatgaatccagcatggaatgtaagcaaagtgaatcacagagcccatctgcatgctgggagaggagctacaaaaccaggaaggagattatagggccttgacatagcccattcctgagggtaggaaaaatgtccaggttcaaaaaagaaagtgtacaaagaaagaaaagaatgcttaacaaccaccacattatcacagatacaagttgagtagaaatgatgattcagttataaaatcaatcatggggaaagtatacttgtaaaacggtactgaactgttgaagaataagctttcactttaagaatttgaagtgggaagagagatgtcccagaaattaagagtgactgctgttcttgaggagcaagatgtcattccctgcactatagttatgcaggaaataactgtctacaattgctactccgtgggtaatgatgaaatattctggcatccaggagcacccacataagatgtgaacatacacacagaaaggcatgaatatacacaaaaggaaaaacatatatgaatgtaacaacaattaatgaaaaagaggacatgaacttgcaaagagtgggttggggtacacataagggtttgaattaatgagaaaagagagtgatgtaattctactatatgaaataaaaagaaatgactaaaatgaaaaattttttagcaaaacacaaaacacatcaaaagatgatttcttgcattaaaaaatcaccagaattctgtaaatatgcctcctgatattaaattgacacaatacaaatattttagaaattgacaaagtaattaggtgttatgattctatttttaatctgaggaatctacatggtgaggcagttagatgatcttcaggttgtcctgcggtgggcacccaaacctcaggtgagtctgggtgctcctcccaaaaaaacaaaacaaaacaaaacaaaaaaccctgctcgcttctgcctgagaccacacggataagggtgtacctgcccagactggaagacacacccttatctgaacacaccttacccctgtccactttctgccctctgtcctgcttcgggtgcgtgagcctcaggtgagaatgggcactgctctgcttcccaaccgcccccatcaacccctgcttgcttctgcctgagcccactggggcaagagtagacctgcccagaccaggaaggcccaccctgagtccagacacaagtcactcttgtctacccactgccctctgccatccagctgccaccagaggctgagccctccaccagccactggagagagcgagagatcccaaatgcactctctggaggaagggatgggaagaagacaaagtaagaacacactgaaaaacagaaaaaccaatatgacaccaccagaatctagggactccacaccagcaagatctgaaaagcccaacacagatcatgaagaagagatggacctcaaaaattatcttaggaagatgatagagtcctttaaagaggtaacaagaaaatcccttaaagaaataaaagaaaaaacaaggaaaatttacatgagatggaggaaaagacaaacaaaagaattcaagaagtaaacaaatctcttaaagaatctaaagaaagccaagaaaaagcaaccaaacaagtgagggagcactagaaacagttcaaggcatgaaagctgatatagaaacaataaagaaaacacagaatgaggtgatgatggaaatagaaaggctggataaatgattaggaactaaagatgtgagtataaccaatagttgttgaagactttctagaggatatacagtcattgatcaaagaaaatctcaagtccaataaatccctaacacaaaatatccaggaaatatgggacatggtgaaaggccgaacctaagaataataggtaaagaagaaggtgaagaaatacagttcaaaggtacagaaaacatgttcaacaaaatcatagaagaaaacttccccaacctacagaaggttatgcctatgaaagtagaacaagcttacagaacaccaaacagattggaccacaaaaagaagtcccctcgacacataataatcaaaacaccaaacctacagaataaagagaaaatattaagagcagcaaaggaaaaaggctaagtaacatataaaggcagacctatcagaatcacacttgacttctcaatggaaactttgaaagccagaaggtcctggatagatattctacaaaccctaagggagcatggatgccaaccaagacccagcaaatcaataaagtataaactaggaaacattacaaagaataaatgaaacatagagttggttctttgagaagatcaacaagatagacaaatctctagccaaactaaacaaaaggcagagagagagcatgctaattaacaaaatcagaaatgaaagaacaatactcaactttatatggaaaagcaaaaaacccaggatagccaaaacaactctgtacaataaaggatcttctggaggcatcaccatccctgatttcaagctctattatatagagccatagttctgaaaacagcttggtattggcacaaaaatagacagatagaccaatggaattgaattgaaaaccctgatattaacccacataggtatgaacaccttatttttgacaaagtttctaaatctgtacaatggaagaaatatagcatcttcaacaaatggacccagaaatacagaacattgcagatagatccatatctgacaccatgcacaaaacttaagtgcaagtggattaagatctcaacataaatccagccacactgaatattctagaagagaatgtgggagatacccttgaaggaattggcacaggagacagcttgctgaacattatgccagtagcacagacattgagatctgcaattaataaatgggaccccctgaaactgaaaagcttctggaaagaaaggacacagtcaataaagcaaaacgacagcccacagaatgggaaaagatcttcacgaaccccacatatgacacagggctgatttccaaaatatacaatgaactcaagaagctaaccagcaaaataccaaacaatgaaattaaaaagtggggtgcagaactaaatagagacttctcaacagaagaatgtgaaatggctgaaagacatttaacaaagtgctcaaagtcattggccatcagagaaatgcaactcaaaacaactctgagataccacctcacacctgtcagaatggctaaaataaaaaacaccaatgacaatctaagttggaaaggatgtggagaaaagggaaccctcctccatgttggtgggagtgcgaacttgtaagaccactttggaaatcagtatagtggttactcagaaaaatgggaatcagtctacctcaagatccagcaattcctctcttgggcatatacccaaataatgcatgttcatacaacaaggacatatgttcagccttgtttatagaagcatcatttgtaatagccagaacctggaaacaacctagatgcccctcaactgaagaatggatagagaaaatggggtacatttatatattggagtattattcagcagaaaaaaatcaatggaatcttgaaatttgcaggcaattggatgcaactagaagaaaccatcctgagtgaggtaacccagtcacaaaaagacaaacatggtatgtactcactcacatatgagttttagacatcgagcaaaggattaacagcctacaatcctcttcaccaaagaaactaagaaacaagaagaactctaagggataaatgaatggacctcaggtatgggaaggggcaggaactcagctaattgggagcatgagagtagggcatagggagctgccagaatgagaggaggagaaggggataggagaggaggaaatggaggagcagaaatattgagttgggggaacaaaagaggagagcaggatgagagataccatattagagggagctatattagagtccgaggagagatctggcactagggagatttccagagacctacaaggatgacacaaactgacaatctatgcaatggtggagagaataacctaaacacccttcccctataatgagactgatgactactttttatggcatcctagagccctcatccagtgcctgatggaagtagaggcacacatccacagatatacactgatctgaactctggaacttagttgcagagagagaggaatgaaaatcaaaggggtcggtaccaggctggtgagacacagagaaacagctgttccgaacaaggaggagcacatcaaccccagattctatctggcaggctagcacaggactgatccaggtccatgaacatggatgtcaataaggaagcctctgcactctaggggtggccctggtagtggattagtatttttccctggtgtaagaagggactttgagagcccatcccatgtgaagggatgcactcttagcctggacacatgggggaggacctaggcccagcccaggatgatgtagtggactttggggagcccccatcaagggccctatcctgccttgggagtggagggtggatggggtgaggggttggtggcaggagggggaggggtggggggaggggtgggagagtggaggggggagcgaggaaggaaaagggattgacatgtgaaacaagcttgttcctaatttgaactaataaaaaaaataaaatcaaaaagaaataagagatgatcttcagtttggggccagctgaagctatataacaagatattccctctttcaaaaatgaagccacaaattataatatttaacataaaaattaattctctgaaagtgaaggagaagacaagaaaattttgcaaataataatgagttgaaaaacattagtagattgctcctagttctttaggtagtaaatagaaacacaaaaaggttcagaatggtcaggctggatagtgcagtggccactgagcttctttccaagcctgaaacctgagactctggagagtaacaaaaagaaaggacagaaacatctcctacatgttgtcttctgaccaccacatgtacattatggcatgaatgtgcacacatgtgcatatgtgtgtgcgcgcgcacaagcgtgctcacgcatgcgcgtgcgtgggcacacacacacacacacacacacacagagagagagagagagagagagagagagagagagagagagagacagagagaagagagttaataaatgtaaaaatgtaacaattgtctaatgcccctaatggttagtcactaggatatgccaaattaagccacagttattcagttatgtaccattatgaacatgtcagccttattaaaattaagagttcaacataaccaaatactggatagaacatagaacaatgacaacttgaagtgcaagtgaaatgctgagttatcccatcttgccttctgtttttaaggcaatccccaagggttctgtgtgagtatcaatcgctgtctccacataatcatcatcttgcaaaatgtaatgtaaattattagacatttattttctaactgccactaacttttgagagactcaaacaataagaaaaatggtaatacaagtccatatttagagcttatgcataaacattaaacgatgcagacttttaaaatcgtgaagtgaatcagagtccatctgcttatcttaaaagcattttgaaacagacgggattggaaaatctatacgaagattagcttttatgactagcctaagcagactacctttgaaaagtgtggagtaattgtgtttgaattctttttttataatttatttattcttttaaatttaattttacattctaagcacagttctccctgctacccttcacctgccccccacccccacccccagtccacttttcctcacttgtaagggctcccatgaggagtcaaaaaggtctaacactatagattggggtggggccaagcccctcttccatgcattaaggctgatcatggcatcccaccatagggaatgggctacaacaagatagttcatgtaacaggattaaatcatagttctagtgccactgagcatggcacctcaccataaggaatgtgctccaacaagctagctcatatactaggtttgtgtcatgatcttactgccagggacatctctgatagtccaagcttcaaaactgtttcccacacatggagggcctagttcagtcccctggagtatccacagctgttggtctagagttcatgagtttctataagcgtggttcattggtctctgaaaatttctccaccatgatcttgacctcccttgctgatacagtccttcctccctctctttcattggattcccagagctcagccagatgcttggttgtggatctctgcctctggtttcatcaatttctgtataaagtctctatggtgatagtagggatattcaccaatctgattacaggggtagttccagcatcatctccactattgctacttttcttagctggggtaatccttgtagattctggggaattaccttaacacacggtttctcttaaccacatagtggctctctatataaagatttatttttcattgttcttccactgcatcccctcccctagacgattccattccctcctggccacctgtcccagttggcccagtacagctcatctaatatccctcccaagggttatccatgtgtccctcttgggttcctccttgttatctagcttctctaggctgaggattttagtctgtttatcctttgctttatatctaatatccattcattaatgaatatataccgtgtttgtgtttctgagtctgagttaccctactcagggtgtttttttgtttgtttgtttgtttgtttttttttctacttccatccatttgcctgaaaatttcatgaggtcaccattatttttacagtgtagtagtacttcattgtgtaaatgtaccacattttccttattcattcttcagttgaggagcagctaggatgtttctagcttctggctgttatgaataatgctgttatgaacattgttgagcaaatgtccttttggtattatcatgcttcgtttgggcatatgtccaagagtggtattgctgggtcttgaggtagattgatttccaattttcttagaaagcagcacactgatttcagaagtggctgtacaagtttgcattcccaccagcagtgaatgagtgtttccctgactctatattctctctgacataaactttcttcagtcttttttttattagtcattctggcaggtggtaagatgggtttctcagacttgtgattttctttccctgatgattaaggaagttgagcacttccctaaatgtcttttggacatttgagattcttctggtcagaattctctgtttagcgctgtaccccatttttcaattgggttattatgtgtttcggtgtctagtttcttaaattctttatatattttgcagatcagctctctttgtgatgtagggttgtgaagatcttttcccattcattatgctgtcgtttggtcttattgatagtgtcctttgcctttcagaaaattttcagttctaaatacctattaagatacccttcgaatagtgtatcattaatcttttatcaaagcagcttttttttttgcaataaatgaagaacattctagaaaagaaaaccagtcaaaaaagaaaaagcaaaggttttcataagttttctgtccccagttgttaaatttgcaacatggaacttatatctaagctttggaaaacattgtggcactgtgtgtgtgtgtgtgtgtgtgtgtgtgtgtgtgtgtgtgtaaatattggagaagacaaaaaccaattatacatgctacaagatggtttcttcaatatatgtcagagaaacatcacctataacttccccaaaatatggtagcctaaacaaaactgaacatatgacaacatcagtaaacatgacaacatggatagggaagatctcacaatgctccagacatagacaaaaatctagagacatttatcaactgacagaaaaggaatacactgtcctcaggaatgagcaatctaattggtgatccaatactgccttagttatttttgtcttgtcaagacagaaagactaacgcaagttataaaagaattaatttacttaggagcttacatttccagagggtagcagagtccacgactatcatggcaaaaagtatgaagcagccagcagacactggtgcagtagctgagagcttccacttgatccacaagaatgagtcagagaaagagagataactttgagtggtatgggatttgaaatttcaagtcccacccctactaagacactttctccaactaggctacacctcctaatactttccagttttaccagttgcagaccaagcattcaaatatgggacatttgtgggctactatcattcaaacacccacaaatatcagtggtcagtcctgaaattgtgtacatataatgacactaaatggagtatgcagcttgtatttttgtagttgtatttgtgtatgtatgtatgtatgtatgtatgtatgtatgtaataaagaaaaggagaaaacagattacaaatgtatatgactacatgcacaattaaaagttacatatacatcaattcttaatatgcctataactgctgtcctgcctgtcatcatttcacttggaaatttcattggatacagtcaatcagtactattttttctatagagtaacaacattgaattgacctattttcttttgttataaaataaatgatagccaatgggagactacatcagttttataaggaaggttagtaaatataaaaatatgaatttaacatttagtcattctggtcagaaagaaaattattctttaaagattaagtttgcttagtggtttatagatcaattttagagtagaaaaatggcaaaaccaatgcttttgtcatatgtagtaaacattgcattgctatataacaatatacaatgaatactattttcttgaaatcttttggtaagataaatttttcctctcctatccaatcttctatttgtgctacttctacaaaaacaaaaattaaaaaagtaacaatgtatatggtaaaatcaaataaactaactttcaaaacaaataagaatattgacctaggtattttttctatctttgtggtttcaaaaagttttaaagatgtacacatgttatacctttatctttacaaaagtatgtatatataattcggaagaatttgttaattattttagtcaagcaagttgtaaattaaggcttcaaattaaatatgattagaaggatttttgctgttttcctgatggggatattctcctttaaaaataggtgattggaaatatgtggatgaaaagatatcttgggaagttaaaagaactaggtgggctctcaacatccagagtttgcttcctatttcttaactccagatccagagggtcagacacacatgactgacttctgggggcacaagcacatataatgtgcctacaaatcttttaaaaatttgcaatatatttaggaataaaatccaattatatgttgatgttggctctgcattatcacactttattctcggggtgatggtgtcacgtttggaaggctatggactctttttcaggtatagcttaaatggcagagatagatcaccatgggtcttagaaggaaatacttagatcctattatacttcatgctttcagatctgccatgagggagaagctactctcacacctttactgacagtagtgtctacatcacctcgaaaccataatccaatagatctcctgactctcttatactgtgtctgctgtgtgtcatggtcacaaaaacaaaaatggtaaataataattaataataacaataataatgaaaccctacattgatagagggaatgtgattcatataattaaaaacccaaggagtagatagattcaagtttgttttactgtgagataaaaaatggaagaaacacactaaggtcaacatacagtctgaaacagacttagaagcttccccagtcactgagtcatttgttagtgtaaactcaagaatcaataattcaattccttggttttatatttttatttttttgttttttggacatggtttttctgtgtatttccttggctgtcctggaatgtgctctgtagatcatgctggccttgaactcacagagatttgcctacttttgtctccttagtgctgggattaaggtgtgggtcaccaccacccaacagtaactcagttcttaattcaaagaactggatacacttgaggagcttatcagtcaatcacatgagatctgtggcttctgttttcacagtatgtttccaccacttgaatttaaattttgtctagattggtattggtattaagataatttgtgccttattagatttacaaagaaaaatcttttctcctaatgtttttactcagcaaaattaatctatgccctaaactaaaataagttcagaaaattaccatagtgaatgagtgtttggctatatctttgacaaaattttctctgcatgctatgaaaatttttacctgatgagtgaattgtttgccctgattcatttctctcagatggcataatctcttcctatgcatctactcacttaggaaacagaaattaatgtaatgattatattactattttctatttgttgttatttaaattggttaaaaattctctttgcacaacatattaagtgctataattgtgcaatataaattcattagactgatttcattttttctttttttaaactttttaaattttaattagaaagaaaattattttatatgtcaatcccaggtccttctccctcctctcctcccctgttcccccaactaacaccctacctatccataccctttctactccccagggagggtgaggctttccataggggtcttcaaaatctgtcatattctttgggatagggcctagtccaacccccttgtgtctaggctcagggagtatccctcaatgtgggatgggctctcaaagtccattcctatggtagggataagtactgatccactacaagaggcccccaaagatttccaaggtctcctcactgacacccacattcagggggtctgcaaaagtcccatagtggtttcccagctgtcagtctggggacaataaacaaatgttatggcaaattctcctctcatccaaacattcccaagcattatgagatagttctatgactaaagaaaagtgaaacaaaattcttttagttacaggccctttcatgtctcattccacactcatagtaactcaagctcatctcctttattttgttttcatgtacatgtatgtgcttctatgcatgtcatacctggtccctacagagaccagagaagataccagatagtgagcagctggagtgagagactgtgtgttacctgatgctcagaactgaactctgttcctctgcaagagcagcgaatgctcctaaccactcatctttctcttcagcccatccagaaacctttatagttccacttacacaaactcccataagagctgaagtatgatattcatggtttataacattttcatgaattaaaatagatactggtaagaaaagataactaatgaaaagagctttcaaattctgacatgtattattgaatttttgccatgtacataaatgcacacataaacttagcacatactgtattggcaaacagacttgcaaataggtaagtttgatgaaattagtagaagaaattgttatatattttgcacagattgacaaatataaaatgaattttccttgttatgtggactgattctgttcaaaatgctatatcttgaattaattggggatctatctatctatctatctatctatctatctatctatctgacatctatctatcttagtatctaccatctaactatatctatttataatttcttactgaaattataaaatttcaaatttttgagctccttttattttcataaaatttgttatcctaaaaaaagaataaaaactttcctgggggaaactattttagaaagtagtaggaaaattgaccttttagatgtaattcaaatactaaccatctaatctccactactacaagattactaaaattcacataaggactgttacccaataccatatgatgtaatatatatagtaattcatctctaactacttattcagtagcatacaatgattcagaaatcaatctttttttaagaatcttaattcaggaatgtttttatagtatcatctgaaaaaaatgacctttcttggtgatgagatttctcaagttcaattcattagagccacaaaaactctacacaaaccacagcacacgagactataaaacctctaaaaacattcttggtgcagctaagtatagtcaaacccaaactcagtccttattacttagtaagtactatcatattatatataaagatcattaaatcttttccaagaacataaaaaaatcatgtgtacaatctatagttttcctctgagatttctaaaatctaacacatcattgctgagctttagctaagatatttttaaatatttataaaattaaaaacaatcacattttacaaaccaatcccagttccttctccctccagtcctcccatcggcccaaccatctccccatctcaaccaccatccactcctcagagagcatgaggcctcctgtgagagatcatcaaagtctatcacatcttttggggcaggactggggtcctctcctctgtgtctaggctgagagagtatcctttcatagggaatgggctccaaaaatgcttttgtaatctagggataaaaactgcttccactgccagagactacatatacttcccaactgacacccactttcagagtgtctgattcagtcttatgaaggttccccagctgtcagactggggtccttgaactcccacatgctcttgtcagctgtttctgaagatttccccagcatggtattgacccctttactcatctctcctccatctttacaactggattccaggagtccaacttagtgcttagctgtaaatctctgcttctgcttccatcagctactggatgaaggcgccaggatggcatttcaggtagtcataaatctcatcataggggaaaggcatttaaggtagcatctccactactgcttagattcttagttagggtcatccttgtcaatccctagagatttccctagtgccaggtttcttgtaaagcccatgatggctccctctatcaagatatctttttcccagctctgcttctctgctcttcccccaactcgaccttcctaatccctcatgttcctctcctcctttctctttcccctccctccctccctccctccctccctnnnnnnnnnnnnnnnnnnnnnnnnnnnnnnnnnnnnnnnnnnnnnnnnnnnnnnnnnnnnnnnnnnnnnnnnnnnnnnnnnnnnnnnnnnnnnnnnnnnnnnnnnnnnnnnnnnnnnnnnnnnnnnnnnnnnnnnnnnnnnnnnnnnnnnnnnnnnnnnnnnnnnnnnnnnnnnnnnnnnnnnnnnnnnnnnnnnnnnnnnnnnnnnnnnnnnnnnnnnnnnnnnnnnnnnnnnnnnnnnnnnnnnnnnnnnnnnnnnnnnnnnnnnnnnnnnnnnnnnnnnnnnnnnnnnnnnnnnnnnnnnnnnnnnnnnnnnnnnnnnnnnnnnnnnnnnnnnnnnnnnnnnnnnnnnnnnnnnnnnnnnnnnnnnnnnnnnnnnnnnnnnnnnnnnnnnnnnnnnnnnnnnnnnnnnnnnnnnnnnnnnnntatatatatatatatatatattcaatggtttaatgaaaatgattaagcacataggacaattttcataggttgacacttgtttttaagtccaaaattctaacattgggaaattagactaggtgttgtaatcttggaaagtctgaattcaatagtagctttccttggagtcactatgattttctttactttatcttttgatgtcctactgatgtaaacagtatgtagaatacctcttagcctgagtatagcatgtctggcaatagaaaagtataatcctgtctttagcatagttggtatttatcttaagtctgacttgttggtgatacatgaataatataagcatgaagaggggttgtttctttctagtcttccttcccaagtagtctgtacacaatctttgtcagatttgacactttgatggtagatgttattctgtataggtttctcttattggttgatgaataaaacattgtgtggctagtggccaaacaggaagaataggcagggctaccagatgaagagaattctgggaggagtagacagagaggagtcatcatgtgagtgtaagaagagaggacacaagtcaggaattctcctgtaagataagaccatgtagaaatacatatattagtagttatgggttaattattaagacaaagatagccaataagaagcacaagacattggcctacaatttcataactaatacagcatctgtgtatttatttgggatctcaagggtggcaggacactgccaggataacgaacacttttttacaacacttagttaatgaagatttaaagcaagactttcacatgaatataatctaaacgcttggatttctgaatagtattcacagaaggagcctttcagactaaactctactaaataaaatatgcctcaaagagtttttcatcttttactgattggcatgatttgcctaaatagcaataaattgtattgcttcattcaaagttgaaggatgttgtaacatattttctattatactagcagtgttttacagtttgtcaatgcatcctagaacaatgtcaacctgcttcctttttcagtcacatgttatttaattagaactgtcacactcagtcctgaggacagaaaggattcaataagaccaaagcgtgaaaatgcaaaatcgcaaacagcacatttgggtgctagaaacatggatattgagtcagatttagatcaaaaggagagaagacagtaatgttgccaaactgggtttttaaaattttgaatacaactataatattcatatcacttccatatatggaaaggtaactatccacactgtcacattccatttcattttgttttcctcactcactgtgcttccccaattaaagagaagaacagattataaaatgtctttttaggatcggaatgctcggtggtacagagcacttacagctctgtgtcaggaatcttggttcgattcccaacactgtcatccagtggctcaggactgccaaaaatctcagttccagagaatcccacactaagttatagtgtcctctgacaccaccatgcacatgaggcacagaaagtgattcaagaactcatacatatacaaatacaaataaaagaaaaataaatacaaacaaaatactaaaagtatcctctcccacaagattctcctcaagacacaactcaagacactgatgcaactgaaactcttgcccagtgttttaaatcactgacttctgaagattttccaaaggagaaattaattcctactcctcaacatgatggagtttttaatgagtaccttatatagcattcttcttgttcatgtacatttgtaatagctgatgcagggactcattgactcaagattcctgagttttagagtagtttatgagtatttttaaataatgtttaaatttgatgtcacaacaattactttcaaagtgcccatattttacctgcatttctgctctaatttccctctttgcatctccaaacagctgttcctccctcttcccactgatcttgtttcataagcatcactaatgagcctctgagaagtgtgctaaatgccctaaagctgcaataaacaggaagacagcttttaaacttacttttatttgtattccatttaaattttaagtccaaaataaaacacacacacacacacacacacacacacacacacacacacacacacacacacaagatgagaagaaaagattacagaaattaattacccccatttttattttccttttacatcttaaaaacaatgcattttttctatacaagtgcattacattgtgtttaaagtatagtacacatataaaagttaagtagaattaacacaaaatatttgtgcacacatggacatatttcacatgtgagtgttcaaagctagtatttaactacatggaatattctttgaagctggaaagatattcaataattaatattattggctgctcttgcagagaacttgggttcagtttccaagacctgcattgtgtatcataacagtctccaggtttagttctaggggtcaaccaccctcttattaaatctgaaggtacacagacatgcacataaccaacatatccacacataaaaaaataaattaggaggtatttgtttttagaaaaagtaagtatactcttcagatggaaactatattattttgaatatgcacaaaaaatctcctttcttcttagagaagttatatttatttatgtttatccatagttaagtcttgtttatttcatcttttgattcttgtaatctttcaggattcttattgtaagcatacatttacaacaattaatttttataattattctgacaatatctaggcatcctatctttaggatggtctatatggtaccatctctaaccttcacaaacattgtatactgtctaatttttagctaacaaatatatgattgggtacctgaggcaatgactcaggtgtcaaaaagcatgtatttgttacaaatttgttttccagcatgtagtaagaggcttagtgttacctgtgactccagtgcctaggcacctggtgccttgggccatcatagggacggagatgatggagacacaattgaatcagagcacagaaggaaaaggtggatttttagtaaataatgataatttataaaccatcaaaaccttagcaactaacatttccgttttaggacaatgcatatttcagtgaaattgagatcactaagttttctcagattcttgagagacaaaggaactaagatttgaagtctatctatactattactctagagagatacagatatctgaaaatcaatgttaaggtctatccacctggagaattaattgttaaaaccataaagaaccatggatacactgacttcaattttgatgaatttcaggaaatgaccccaaaggatgccagaaacttgccttcagaggagatctgaggaaaaaaaaaggtacttgcagttctagcaggcaatgaagagaaacacctcaagctttgtttatattgcaaatgtaatctgtaaaaattcttgagagtattatgtcagttaaaagaagaaccttgcttctctagtcccttccagagtcctgtactgcatgaagggtaggaagatgcaatcattccctgaacatgagtcaattttaggaaaatgaatttgaaacacaacaacttcattaaagatggggagaaataaggaaaaaaaaggctgtatgtgttcttgtgaaggtgatgttccagtaactggggcctctagcaactgtacaaagcattcaagcatagacaaccttcccacccctgaaatattcatatttgtaaccacacagaagtctaacctgcctcagttcttagtacatgctacatgtccatcttttaacaaaacccagggggttactaaaggcaagatgaaacaatctggagtgtcaaaaaaactagtcaacagtggtggcagagacttcaaaggtcacaagaatcaaaatgaaacattagaaatcaagcagcaggaagagaaatgaagatcatgtttaaagaacttaacagtaaatttgaccaagacaatggcttagtaatcagtgaacttcagttgatgtattaataaaaatgtcttcaagtgaaatgtcaagacagaaaataacagataattgatgaagaatttaaaaatgtatctatatatgtacatatatacatacacacatatacatatgtaagtatgtatgctgtggtatgtatgtgtgcatatatatataattatatatatatatatataattaaacaaagcagaaaaacaacttgaaaaagtagaatccaatgtcttcagaagtaatgattatcattaaaatcacaggtataaaatatttaaaaaataaaacacacaaaatttcaggtgtgtatagcacatttgaagcctaggaaaattaagtttgaagcaacaagtcttgacagaagctgttttgtatatacaggaaaacaccttggtcctttttatgttcctgtcccacaaacaacatgattaaaaaatcagaataaaatatagtgatgatgtataggtttatttttttagcattacctaaaaatgattatacaaatacttacataaaaattttcagttataattaattcaaggtggtttaaatagaactggacatgcacataacttttacaagtaataataattttcaaataataacatagagcctctgtggatttgggtatatgttgatgaaataattcatgttaactgacaatttgaaagaacctagaatcacttgagagataggcttctggtcatacttgttggggagtatcttgattgtattttttgaagtgagtgggaaagccacctaccatgggtggcaacattccctgaatggaattttagatttgaaagcaccgaggtggttattgagcaggaatattcattttttgttcttacctacttttcggtggctccaatgccattggctcctcttactgtgatttcccaccaggatggaccttaatttgaaagacagaagaaatgctttgtcctttgagttcctttttgaagtttattttatcacaggacaggaaaagaaattaagactgagaggaatcctctaaccagtaacccctgtaccaagagatgaatgtataaaagcaaaatttataaaacctgcatatcataagcatatgaacatggagtaaggtttatctcatctgggacaaataatgcaaattgaaaattttacccaattcagtaatctatcaaaagtttatatctccactttaagaatttagaaaaataatagcttaaaccttaaataaatcaaagaaaataagctgaaatagtctacacaacaaatttgattacagatgaaatggagcttgagtgtttaaaaatactcaaagtcacacaaagaaaaacacatcatttgagcagtcttatgcctgttaagggaattgaaacaatgctttgatagggaatgtcattctgtgtgctgtgaatatatgtttctcttattggttgatgaataaatgctgattgggcagtagccaggcaggcagtataggtggagctaccataataggagaaaggaagagagagagttaagagggagatgccaggtagctgctgaagtagaactaacatgctggagcattagcagtaagccacagcctggtggcaatacatagtttaatagaagttgtttaataataagtaagaagtagccaataaggggcctgaaccataggccaaattgtttacaattaatataagcccttgtgtgtttatttggtactaaacagctgtgggattgggcaaaaagtaacctctgttttaaatgcttagtcactctttcctcaaaaatcttaagtgccatgtgattacattgataaattttggaaaaggaaacctcttccagaaaatagaagcagagacactaatttccaattcatcctattaggtcaaaaatcaaagctagataaagattctgcaaaaataaataccatgtattaatataggctagtatacctgatgatataaaaatatacaaaatatgtggtttcttaacatataaataatgagctatttttacccttgtccttaatcaggattattatactcatgaaatcacagaagctgtggttgacattgcaagatcaagccattcaaaatataacatgccacaaagattctttaacaagaccccaacaatatctgtgaggttattgacaattgatggcatttggatgggggaaatccagttttctttaaggtgttctccactcttccactttagagtggatcatcccacactcttttatgtgggcaacacaatttatacttggtgggttattaaaaaaaacaaaaacaaaccactgtcagtgaaagtgtcctaagctaaaggactctatcttagaaaacagaatcctaaaagtgggttttctgtttaccaggaacatcccttcatctgccaggacctcccttagtcttccctcaatatcaaatacctcccaacagtctataagctcaaagacttccattctgcagattgttgtataaaatgtgcttgcttttcccccattttgtttcactttgtctcccacagtggtaaccttgttagtttaacctacaataaacctttctttctacgatgtgtccaagttcagtgatttcatagaaccctcactcacatatacaaattttggattagatggaaaggagagcatggtgatttataatttatgatttgtcaaacttgcctgaggattcagaaagcaaaggcagactcaagctatagagatcaggcaatggtagaacatacctttaatctcaggactcaggattaagaggtagatagatctttgtttgttcaaggtcaactgaccacacaaaattgatccaggccaattttgtatcaagcagagtacagcttcaagggaagctattcacatcttttccttggcatattgcacaacacctctgacacttagaaattctggtgagtttgagaattgtttctatatgccctgcatcataagcaaggtgtgtcttaagcaataggttcttcctttctagttatggcttgcaactaagaacaatgacaatagcctctgttgattggagtatttatgaagcctccaaattttaacacaaagtatcttaatatcaaaatatttcttgattttcccttcaattttttactttctctgattttcaggagtaaagaaatacatttagagtccaaatagaggctacaattctaaacattttccaaaggaattaaattgtttgtgagttgggatggtcatattcttgaagatctcctttgtcagagaatattttctatttcacaaaatttatcatgccacaaattggcttcagtcagtataggaaatgcttcccatccctgaacctatactgatgtaaatgattactgattcaaagaagactgatcatcaaataaaatacacagtattcctaagctggtggcctcagcactgatggaatctcactcttatacttccttctgaaactgtaagatttaacaatgaagtgttataagtgctttgattctccatgattacatgtgaattggaaggattattcttttataattaaacttcagatcatgatttcaaagtacactgcattggtaaattgtcctatgctgttttagctcactggtaagcttgccctagaagcaggcttgtcttcctcccattttagatctaagttccttttcttaggttagtctcattagttctgtgacagagtgaaagagaaaacaacaaaaaataacaacaacaaattatcccccaaataagaacatcttgtcttttcaaacagctagaaggaaagtcatttccaaaagatgttactatattttagcccatgatatgagtgcccatattggcataaagtagcagaagtccagccttgggacgggcattcatggagcatatgctcaatcaggaattccagctgactggctcaacttccctagttagttgccactgaatgctgtaagtacccaatttgatggtgtcatttttttgtggcatgttaccctgcttggacatccctttggggagggggtgagaagaagcagcaccaaggactcaggcaccatgagtcagcgagtagtagagcatggtgcagacccatttattcaggaagttaggccttcctttataccctctcccaaggtcctattagctcaggcggctgactctgctgtatgtccttttctcacaaatttctttttgacagactactgtgctacaaggcaaaataagagaccttaggaatgatgcaaatctctaccatgcctgactctgtcttctctggatgagcagtagtcttccagaagaagaagctgcaaattttatagccatagagattatcaactttcatgaaaaccacaagttatttcctaaaaaatgattcttcatatctgcctctgccacacatgtgttcccatcagtgttgtgaagtacagaccaacttaaatatgctaatttcatttaaatatttattaaggtattttgtattaaatttccctagtaagtttccaaaagtaactgattccatggcaagattttatgaaacgctgccaatcataaattgcattctagatctttctttctgtgccatttatagtctcatcttaaaggttttttaaaatacacctttgtttatgtgagtctgtgtgagggtgggtgggtacacataaccttgcatacacatagaggagacagtagtagttgggtgacttctttatcccttcccacttattcctttgaagtagtgtctttccctgattccatagcaaccaatcttaaacgtaaagttatactttctgtactttatttcttatttaaaaaaaacaaagatgctcttagtcattaaaattagattggcacatttgtattgaaagagaagtctctgacactgtcacaaatctttgattttccctttgtgcattcaagaaacttattgctagtctcagatttagaccagaataaaaacatacaggagtttctatgatctcatcttgtttgtgtatgcataatagtttgaattataaagcaagagtcttggaaattagttcctggtgaattaatcagcaaggagagcaaaggtgaaatttctgcacttgaaaataaaagcttgcatggagtcactgaacgctgcctctgttcatgttaatcatttgtcttgagaattggctagaataattcctatgatgatacaggatgcaaacaagtagctaggatcacagaagactcaccaaaactctaagtctttgtgaatgtggaagaagatactgtgtgtagatgatcctgagagagagagagagagagagagagagagagagagagagaggaggagagacaggtacaaaggttgacaaataatgagtacaccttgctaaagatgtatttaggtcaaacaactatattcagaacagatttttatgttcaatcatattcatttgaatataggtcttattagaggtatctctatgtgacttattctatgtagttatgatatccttgtctctgtaatattataaaagttagaaaagaaggacagttttccagatctctgtactagtcagttatatccaacatcatgcctctctgaatttattcttttcattttaaaaaaacattgtctttaaaatatagcaattaagaaggaaaataaaaattccaaattgttcactagttggatcaccttctgctttacaataattatctgtgtaaaattatccattttgtcaatttcaacattttaagtttttctaaatatttgggttgaaaagagatgactataagccaggggtggcagcacatgccttcagtcttggcactttggaggaagatgcacatgccaaggtgatatatgtgacttcaagaccagcccagttcacaaggaatttgggggcattcatctattacctaaaaggcaacgtgcctcagtttctgtctggaagcttgactactcataccttaaagaaacgtaatcaaagtacaaacctaacctgttgatttccatgtttattcaattcttttttatttacacttttttttctggcttaatttagggttttggtgttgttgttcttattctttcttcatgttgccaacattttcaattattcactatgactattcattgctctactttattcttttattagtttcctttaaattctaagatgctattttgaaaattgagttttgcccaatgggcttactcagttttcaaataattcaagaatttgaggatgctgaatattccacaatcccttttgaggagtttgttagactgtggtccacttttctttcattgtattgcaaacaaatatatatttgtcgctttatattttatgtgtgtatatgtataagtgtggtttgtgcatgtgtgtgcttggtgaacatgtatgatatgcttgtgtgtaggcacatgccacagttcctgtgtggagaacagaacataacttttgggaggtagggtccttcttacatggtctgtgctatgaatgaaatgatatctggccttctagtttcagatcattctcctcaatcacttacctctccatagcaaatatgcatgctcagctgtgcaaccaggttttttacatggattcagggatctggtccaggcagccaggcttgcaccacaagtgattttactcattgaggcatctctctggccttgaattttctttcactttggtgctgctactgctatattttattttagtattgggcaagtgcttcattgtgtagctcaggctacccttggatcctttcaatccttctgacaagtgtagagactttaggagtgtcctagaataaatcatctacatttatacttttccgtgactcttcttcaatctatttttaacattgtttggaatatttttctgtagatcaggagtaacaaactaatagactcaggaaatgtgtcaggacacaggcaggacttgcacagattaaagcctactgagtccctgtacagagaaaggaagcagatacaggttcctactcctaacccataaagtgttacaggtttcattttctttcttttctgttttgctttttgagacaaggtttctatgtgtagctttggagcctatcctggaactagcagagcagatcagggcagagaagaattgtttaacactttcactttccaaggggaaactttcccctactggagcagaggtgatagactcctggggaactaagaagagctttaacacttttctggagcacagaagagctgagctgcaacaacttcacttgggaaatcctcccctgcccaaccagagttgttacactgggaaaacacttccctggagcagaactgtaagttgatacccttatactgactttatggtattccttggattccagctaccaggatacctatccatctgagatgcaatgcttactgagagtcccatgtccatctgtggagtacacaaatgtcttcaggtttgtccttgagattaaattgtcctctctgtatatcttctctattttaccaatgctattgtaccaagcccccatgcacaactgacaccatggtaaaagaatcattcacaggagggaagaggcatgagggaccaggaatattgagtcgggggaagaatagaggatagaaagaatggaagatatcttaatagatggagcaattatagggtgccattataagtttaaatagaaatctggtactggagaaatgtccagagatttgcaagtttgatcccaactaagaatctaagcaataggggagaggctatttcaaatgccattcccctataatgagattgatggctaccttatatgccatcatagagccttcatccagtagctgatggaaacagaggcagagcccccagctaagcactgagccaaatccctggaatccatttggagagagagagaggagtgatgagcaaaggggtcaagaccatgctggggaaacccacagaaacagctgacctgaacaaacagctcatggaccccagactgacagcttagaaaccagcataggacagaacctggccccctgcacatgggtctcagttaggaggcctgggcagtctatggggcccctggtaatgaaacagcacttaaacctagtgtacaaatggacatttgaagcccattccctatagagagatactctctcagcctagacacatgggggatgtcctaggccctgttccaaatgatgtgacagaccttgatgataccccatatatggccttaccctttctatggtgaggatgggatggaggttggtgggggcatgggagaataggagggagaggatactgggattggtacataaaataagattgtttctaacttaaataaaaacggaaaaaaagattcattcagaccttggatcctaataggttggcatcaacaccttccaaaataagaacataaaccacttgcctattttggcttctctagttctgcttctgggtaactgctcttgatcatttggatgtgtcatgccagcaagtagtttttgtatttgaaagcccaacctgaggaagactcggggctccaatggggtcctgaacaccatccactactagcctcacaaaactatcttattgtctttgtgcttagatattctttgcaatgctttttggtgtatctcctactttttgtatttggtaacaggaaattacccccagaatgaagtctgcccttttctgtcctttgagatttctgattcagttcctatttcttttgttttgactagtttctttagttttacagtgttcttgaatctgtggtcctaatttccattcttgcctctgtctccatccttttagtgatcacaattagaacttagttcacagaagctacattgtcttggttattatttcgaaatatagtgtatagtgcccttagaggacagaattgggcaactcatctcctgggactagagctatagatggctgtgagctgccatgttgatattaggaatcaaattcaggtcctatggaataatatctagtgctaataacctcgaagtcatcactccagttcaatattggtcattattgatcatatggttaattttatttataggtccttttttatagtttagaaaacagaagtgctgaattgagaggatgtgtgattgcctatattgctgcagaccctaaattttgaaccaagacttaaatcagacaatctgtcttcataacacctgccttcattttcaggccactttgtccattttgtccattagaccaaaaactgaagaggtgactctccagttaagagcactggctgggcttcaaattccagtacccacatgggaggtcacaattgttggtcattccagttccaggctgtagaatactcacacatatatgcatgcaggcaaaataccaatgcacataaaaataaaatgaaaaaattaaaaatcaaagaaaaacaaatctcatttggcagtatatcccacaagatgaacaaattggaacacattatctctgaaaccaaatctgcagtctctatttttcttgattacttgattgtgagcaccatccttttagctaactacatgagagattggatatattatgattttctctgctattccttactacattctatcagtattccttaatttctgtgagtcttgtgataaaattactttatggacatccatagtaagtttccagttgtcctgcaagttccacggtacttactgagtcttccacacttgtgttagagaagttaccaccaccttatacctgtgtccatcctttccttatcatctgccttaaccatgttaatcctacaggatgaagtaactgcattatatcacaaatattcaggtgttttacactatttttcctctgtactactgtcagctgttatttgacagatgtttgagagtccatatttataatttttgtctacaaagatctatgcatatataagcttatatgattgtcagtgaattttcttgttcctagtaaatcatcttcatttatatatgagcatccttcattgtttcaatatatttatctcttataaaacaacatatagtagattaactagaataataagttcttcataaagcacagaattgcatgatgaaagttaaaggaaaataaaggaggggtggaataagaaggggaaagcataaaggtcacttaaaaaggagaaaagtaagagaagtatggatatacacagaagagtacagagtatgccatatgcaagcatgagaaaagtaacccattcctcctgaccatctttgaacagacatcttggaatacctggattgcaacagataattagcaaagtcagggaaattttctagatacctttagagtttaaatcagaaaagatggttacatctttataagcatatttcagaaaggatgattttctctacaaattcaagtgtgttattaaagtcagttgataagaatttggaatcaggaacagtcctatgctggtttcccagctatcagtctgaggtcctcctctgagcaacctccttgttcaggtgagctgtttccatcctggtcctgacccctttgctcatcactcctccctctctgaaactgcattacagagctcaccttgttgtttagctgttagtgactgtttcagaccacctgaggatttcagtttggaggtctgggcaatctatggggcctctggtagtggataagtatttatccctagtacatgaaagactttgggagcccactccacaaagagggatactctctcaacctagacacatgggggagggtctaggccctctaggccctatgacagactttgtagattccccatagaaggtctcaccgtccctggggagcaaaaaggatttgggataggggttgggggctcaggggaggaggggagatagaaatgtgattggtatgtaaaagaagcttgtttctaatttaaaattggtattatttcaattattaaaaataaaataaacactatagcatagttcagataaaaaaaaaggaaaagaaaaacaaagcaaaaacaaaggaatttggaatcaggatatccaaaatatacagaattaaagcccaacatttggcattaaattgaaatgcagagcacaatcaaagagaagctgttagaaaattacttgcatgtacatgagggacatgtaaaatgcattttactggtgtttcataaatgggggaaggctgaagagagaagacaatttaaaccttatctgnnnnnnnnnnnnnnnnnnnnnnnnnnnnnnnnnnnnnnnnnnnnnnnnnnnnnnnnnnnnnnnnnnnnnnnnnnnnnnnnnnnnnnnnnnnnnnnnnnnnnnnnnnnnnnnnnnnnnnnnnnnnnnnnnnnnnnnnnnnnnnnnnnnnnnnnnnnnnnnnnnnnnnnnnnnnnnnnnnnnnnnnnnnnnnnnnnnnnnnnnnnnnnnnnnnnnnnnnnnnnnnnnnnnnnnnnnnnnnnnnnnnnnnnnnnnnnnnnnnnnnnnnnnnnnnnnnnnnnnnnnnnnnnnnnnnnnnnnnnnnnnnnnnnnnnnnnnnnnnnnnnnnnnnnnnnnnnnnnnnnnnnnnnnnnnnnnnnnnnnnnnnnnnnnnnnnnnnnnnnnnnnnnnnnnnnnnnnnnnnnnnnnnnnnnnnnnnnnnnnnnnnnnnnnnnnnnnnnnnnnnnnnnnnnnnnnnnnnnnnnnnnnnnnnnnnnnnnnnnnnnnnnnnnnnnnnnnnnnnnnnnnnnnnnnnnnnnnnnnnnnnnnnnnnnnnnnnnnnnnnnnnnnnnnnnnnnnnnnnnnnnnnnnnnnnnnnnnnnnnnnnnnnnnnnnnnnnnnnnnnnnnnnnnnnnnnnnnnnnnnnnnnnnnnnnnnnnnnnnnnnnnnnnnnnnnnnnnnnnnnnnnnnnnnnnnnnnnnnnnnnnnnnnnnnnnnnnnnnnnnnnnnnnnnnnnnnnnnnnnnnnnnnnnnnnnnnnnnnnnnnnnnnnnnnnnnnnnnnnnnnnnnnnnnnnnnnnnnnnnnnnnnnnnnnnnnnnnnnnnnnnnnnnnnnnnnnnnnnnnnnnnnnnnnnnnnnnnnnnnnnatatatatatatatatatatatatatatatatatatatatattaaaactaattctatatttcactgaaaaattttaacctagtatgaaatattacacagttccttgatgacatggggaacctgaaaatgtatatttagggtcaggatccacaaatacatattttaagttatttatacactgtaagattatgtatgtgaccattggttcttcagacttaaagtgatttaatcctaagaacaacttctcacacctacagagtttgcgctgttaattgacacagacagtagagtcatttatgcaatcaatgaacagtgtcttttcaaagaatatgcttctgaagtcagtaatttgtatggaagatctttgcttctttcttagattctatttggacattgcaatgttcatatacattttctcacctttaattggaaagtttttagtttagttaaacagtgcacattaaagtacttactaatctttagtgaaacatttttaaatatatttattttattttatgtgtatgaagatttgcctctctatgtgcatataaagcatgtgcattcctggtgcccaaggaggacagatgaagatgtggataccctggtacttggttctggggttacagacagttttgagcaactctgttgatgttaggaatcaaacctggatcctttgcaaggacataatttccttaaccactgagatagctctccggtccattttgaaacattttgaatcgactaagtttattttacaactacaacaaccaaagcagaaaagaaagggatttaaacttctcagatttgggatttgcctcatttagcttggaggtaaggatccattttatctattaactctatctagttttcaagtaggatgttgttaaggtaaagtgcatacattcagcaaaagcctagataaaaaataaaagtttatcgaacattaagagtttgaaaatagcttggattaatgatcaacatatcctttttcagatgttttatttaccaggagagtctcataacattttatcttttattataagttattatctcaaatcctcaatggaaataattgatagacaataatttgatgtttttataatagaaacaaattcctttgatgactaaaattacagaacataaataacaaaggcaaatgattagaatcatctaattgtttctatttatgcatttattttgagagtcagaaaaagacagctaaattgttgatatttatttaaatccagggaagatagttctgattaagaaacaaacagttgtatcaaagataatcaaggaatattttaaaccatagaacaatatacagcatggcaatatagttcaatgattatgagcacttgctgactatgctgaggatgcgaacttgattcccataagtgatagagtgcctnnnnnnnnnnnnnnnnnnnnnnnnnnnnnnnnatctgacttacacagagtatatgttagaagttagaggggagcatatggaaaggttggttttcaagtaattttgactttcacatccatgaaaatgctatccctaatcctgatagttttagcatttaagataatgcaaagtactgatgtaccaaaacgcttcacatggagtcccaaaagaatgttttatatattataaacacacacacacacacacacacacacacacacacacacagacacacacacatatatatcctatctcccactaaacataaatgctccagatggtttcataaaatctttgtatcatatatgtatgtgtttgaacatatgcataataatggtaagaaataacattaatttgtgtgtactggtgatagggactttactatttagctttcacagtgggtacatgttgactaaaagaaagacaaagacacatgcttagaggccacataactctgggatctttattttaggcatacaatcaatcatacccattgatttttatcatagtacacacttgatgtgaaatagaaattttaaaatagcagtgggccacatgtctgttccaatcatatacaggatttccttgttgatgactgttggatagcaggaacagctgtaagacaaagagactaacacctcatttttctttaaacatttgcttatagtggagtataagtggggtctgtcgtttatctatttacacaaagaaatataatggcagacagaaatagagccatcagtggtttggctacattttcagttttgaattagtaaagatgcttgagttgtgtatatctccatgacagaagagaatttttaaataattattcgttcgttttcatattttcaaatccttacaatactgtgccttaagaaagatgtgatcattatattcattttatagatgaaggtttgaatatacagtgcagttaagagactcacacacacctggcaaactatgaacatggggcttgttaaatatacgaacactattctgtaatggcttttttttttcttttctattatagcttcctcaagattctaaagtaattcatgaaaaattccatttccatatagtgaaaataacagccaacccaaagtaatggaacagcaataaacactgacacttatatattgctatagatttccccaagcacttcaacaaacattaaagactataacattgctaaattgttggtcgcatagatttgttactataagcttacccaattctcagctttgacaggaaaattaaccttgaagccagccagtgacaaaagctctgcccttctgtgataaagtgctgtgttgataatgttgcattgtagacacacatcaatagctagggatatactgtgaacacagtgtgaaatcagaggtaggtaaagagttcacaccctttgctatggaggagacagcaaccccacaaagcaatggctttcattctactgccatatgcaattttctctgggaattttaggtgatggaaaatgataaatattgaatgtaatatctgaataacaggcaaatcatgaaacaagtattagcagaaaatgctactaatactaacactaaacaagacattagagtaatgctttgaataaaaaacaataatgttaatgataatgatcacagttaccattgttattaatactattatgatgactcctgttataatggcatttaattatttattaagggtttgctagagactttgctaagcattttcacataaaatatattactagattgttgagacagtccactgatttgcatgtaaacaactttaaaactgaaatttttagtggagttaaataatttacttaaagtaaggaggaaagtggtgcaaaatttgattaaaaccaagttcatttgcctgtgactggagagtgttctcaaagacctgaaattatggaaaagcaaggtagcccccttgtatgctacatgccccttcgagttggctttccctgagtacttctgcctcaatatcctgaatggaatattaggcagggtgcctgctcacccttgatcactagaacacagctttataattgaccttttttctttgcaattggctgatagagatacacatatattattacttacttttgaaattgttcttacaaaatatccacaaaagcaacgtagctgaggtttctattgctttaatggaacactatgactaaaaactatgttgggaggaacagatttctttcacttactcttccaatttcattatagaagccagccagtgtaggtcaggtcctgaagtggaagccatgaagaagtacaacaacatattcctttctttgcaagcctatctagaggctcacatgtaccccagaggtcatctcctacatgatcttaaatccagtcatgttgactattaataatcagtattactcattacaaattttttgttcattagtcaagatgcattcagtctcattagactagtcaactcctccagtgtctttctttctttgaactttcttccttcctttctttcttccttccttccttccttccttccttccttccttccttcctttctttcttgtagcatttgaactttaaactgctaacagattctttgacatatcactaacgcaacaagtatttcctgggaatcatccattcaaaagaagaataaatgagctgggtcctagaattgggtacttaaatgatattagaattaagtcattatttgtaaaaatccaagattttatgggtaccttgaatgaatcattataattagacagtcttgccttcttgcttaccattatgataataacaattttatattcttatcacatggctttaatttatcccaatttcacaaccaatggaaaacctgagaatgttttcacattgtaagtagtttattgtcatttattaatgtgctaacactactttcagttccactgaactttatccacaagcttggattccagaagagctagggagtttattcaaagtggcagaaacatgagaaaaatcagatggatttatctcaggaagtttggtgcaaatagtgactgcagagtaatctcaaggagttgaacttacagcaatccaaccactatctttggacaacttgtcaaactttaagttattgcaatagttttacaacatatatttctgcagtcaagcttcagttctgatatactgactatgagacccaataactggcctaacatgaaattatagaaatccatgaaggagcacaaagtaacagttataggtgagaaagtagtagaggtatggcatgtaacttgatttttccatttcccactcacttttatttttcctgtatatagagtatcatttacctacttaatctcttcttactggattcttagttcctaaatataagaaaacttaatgttcagtgttaaaaaagtatcaccattagtaaatacatgagttttcattttcctctataaaagaattaccatcaaaaaacagagaaaatctggaatccaggaattgtgtctcagttactttgtgctgtgaatggtcctttatctaatggaatatttctgaacacactcttgagaagtgaattgccctctcatgatattacgtaaaactgaatgaaaagctaagtagacttaacattatgaaggatgacaaattttcataataagaaataggaatgtatgatatgttgtgacacaaaaataattacagtgtaaaaatatatttggttgtaaagattgtgatacagggagaaaataacaaaaataactaagttgtcagaaaatgtagaaggaaaaagcaagcaatgtatactgttttatttcaagagtaaaatgaacaatagagaatcattgagccaaatgtattgaatgggtgggagcgaaccaaaagaaaatagataaatgggaagatccatcaataggagcacaatctcgctgttgactgaggccctgtgtaaaaacaaacagagaaaatagtgttaactttctaactttggcgtgacatataaaaaaggcagaaagaattgccataatcatgtcttcagattgaaagaaatctgactgcctatcaaatgaaaggttgtagtcttgtgaaagatttgaggtctttaactcacacacttaaactcaagagtacagattatactatctagcacagtgagacacacaatagagcagaagcaccaacaaaatcccagttgtgaaatctgcacttctttgagtattgtattacaagtgtgtatgtgtgtgtgtttgtgtttgtgtgtgtgtgtgtgtgtgtgtgtgtgtgtgtgtgtgtgtgtgtgtgtaagagagagggagagagggagagggagaaagagcgagagagtgagcgcagggtgaaggtgatctgtgccttccatttgttttgcagatatatatatatatatctgcaaaaatatacagcatacaaattcctgggccgcacccttgatcctgcttctaacgagggactgtttgtcgacaaggctgccaggtaatactgatgtctgtggttctatacctcaagccagttctttcttccctatgttctggaattaaattcagattttcagacttgattgcaaataccttcactctttgcctactgacctttcccattgaatatagctatgatatttgtacctaaggcaacgtgggaattcctgcaaatacaatgactggtctttaattgtcctggttggaggtatgatgtagtccatgtaggacttcttgcaacaatccaatgcataggttgatcctaaattgagtacaaggaccaagagaaatgcatcattatattttcataatgcaaatttaaatgcaatctagattacataatttttatggatttgacacgcagcaaagaaaagagatatatcatacacaaatggatttacttagaaataaattatattttatgtgtatgtaaagcaatattctctcatcgtttaagctaatttgagaaacaatagcagtgataaaaagtgatatccacctcactggtttttatggaaactataatgcatgtaaaagaatgacataaattataacataacttgttttgttgtacaagataatttatctcttttgataactatcaggccatatgataaaggacatttttatcatcgtatcttgttctttgatgaaaaggagtatttaaattgtactgcagtctagctacaattagttaattaaagtagtatttcttctttgtgtatatgtgagagatagataagtgggtctatgtgctagtcacaggacaatgctaggtgtctccctcagttgctctctacactatttactttcgctaaggcacttatccctggatttagaatttacttatttggttgactgtctgtcctgttagccagttctggaattagaggcagatggttctgaccctagttattacctaggtgctgaggatgaattcaagtcctcatgcttgtgtagcaagcactttatggactgtgtcatctccttggcctcatggcagcagcctcagctttcactattgactgaatggaaggacttaactcagcagatgtctttcttgtggaatcctagaaaagagctctaaatttttattttcccttgcttgcattatatgaagatggcagcatattctgataaatatgcaaccaaagagaggtgctgagttaacaagaagtgcaccagggctgcccttcccagatcttactgcagtattaaggtttcttggctctattaatactatctcatgatgtgtgattaagtggctctgtttcaagattttcttcaagcttacacagcatgagtgtcagccttaccagaattatgtaagaatcaggtaatttgcgtatcacaacactgatattctcggctgagtattacagtgacgcaattatggatggcaacaggcagctaaagagatttcataaacttcttaattcttttgtaaagatttattttactttttaatgactgtgggtgctttgcctgaatgtataggcacgacttgtatgcctggtgcctgcagatcctggaagagggcctcagataacataaaactagggttagagatggttgtgagctgccatttgtttgctggaaatcaaaatcaagtcctttggaagactagacagtattcttaacctctgggcctcctttccatcccaattacttgtcttttttttcacatctttgcctcaatcttatttttctcttattgacattagatttttctcacataatatactctgattacggtttcacttccctcttgtctccctagtttctccccacatcaccttctttccagagctatccccattctatctctcatttgcaaacaaacaggcttttaatggataataataacataaaacaaaacaaataaaagaaaaagaagcctaagaaaaaagcaccggaaacatatagatgcagatacactgatccttacaatcaggaatcccatgaaaagcaaatgtagaagctataatatatacaaaaaaagaaccttcaggataaaaatagaggcaaggaagcttcaaagatactgctgttatttttgttttcttttggccatatactgctgtgcatgcaacctacccttaagagtagtttgttcctccagggatactcttcccttagagaaaactaaattttcatttgcaagtgtttatgaattgaaagtagcttctgcatttacaatgtccagttgaatttctttagtcttgagaaaatgttgaacagtaacttaggggttgaagagtaaaattaggagcatttttgaacatctatatgtactgttctgagtattctcttgtctatattaggctgttttgagatttcctctgccaaaggaattatacaattctcttcactacagcctcaggcagacccttgggacaaggtcaaaaaagagcgactttcctcaaaagtatctttaagcatgatcttaaggcaacatactaaaatttttattctgaaatctcttgagacaggcccctgcatttcaaatattccatgatcctactagtatgtcttattaagtcttgtttaaagcctttcactgttttcttaacccaaagtaccaaaatccaaattcctccaagtagaaacattgcaggcctatctcgaaaataacacaatccttggtaccaacttctctgtctcaggatttctcttgctgtgaaatgataccatgaccacagcaactcttaataaggaaaacattcaattcgggtggcttacagtttcagaggtttcattcattatcatcttgtgacatggtggcatgctggctgacatggtgctggagagggagttgagcgttaaacatctcaattcacaggcaacaggaagtgagctgtctgtgtccatgctggacatagcttgagcacaggagacctcaaagcccacccccacagtgacacaatttctgcaaaactatacatactccaacaaagccacacctcccaatagtgcctctccatatgaacttatgggggggcaattacattcaaattaccacacagggtattttgtttttcattgctacatacatcaggctgcctggttccctgcataccagggatacttctatctctgccctccatcttttcataggggattacagggatcacagacaggtgctactaattgtgaatttatatgggtcctgggcatctgaccttaggtactgattcttatgtggaaagcaattcacatacagacccatttccatttgttctaacttgtaacttttgatacagagtaaaaactggggaccaaaaccacgaatctagtgaaagacagttgagtgttttgaagtgtatgtgtacataggttgacatccttattagctgtttcaaatatcaggtagttggtacagttgaacttttagcattctatcaagatctgcagtgcaactctaataaaaggaggtcagattcactcaggtcatagagattccaacaacaaaacagtcaaggacactgcattaccttactttctattgctgtgataaattaccatagcataaagcaacttgaagaatatagtgtttatttcaccttacagtttatactgcattatgaaggtaggtcaggttaagaacctggaggtagaaactgaagcagatataactgatgagcaatgcttatgagcttgcaaaccatggcttgtacaacctgatttcttgtaccacccaagaccaggggtggcactccccaccctgtgatatgggtcctcccatatcaatcatcaattaaaagatgccctaaagatttgcctataggacagtctgatggaagaattttctcaattaaaatttctcttcacatattactctacattgtgttaagttgacaaaaattgctaagcaacagagatacagtagagttgaaagtagagttgaaagtgtgagggatcaactgaaaattcataacctctgtaggttggacttagtggtttgttattgcagcttccaaggggagaggtacaacaaaagaatgaaagaagctcctggcttgtgacttcagagagattggcacatgggtgcatagaaaatttggtctttaagttaagtggttgataaaaatatgaattttttttagagcattaacctgccactcgtgaaatttatctgaaagagaagcatgatacaaatgctagtttatcagtatgttatttgacctttccaacaaaaagcatatctgtaccaaaaatactaaatccatttaatatgaattccctgaactatgggcaccaataactgagccatattaatgtaagtggtcaaaatttgcaaattttgctatatgtgtttattaagtagtaaactattttaaggtataatttccttttatattttttccaggatccatgtgtttgcatttaatcaagaattgccaactctaactgaatcttacaaaagatatgttcagttgagattatgatgttgccattttgttaatgaactcatccaattcactaattaggacagaaattcaagtattatgccaccttaatattttttatattttatgttatctactgtataaaaatcttcaatgtacacatcaagaaagggcatttttggatgtcagcactaaggagaacctggacatatgccttcatccctaacctgaaagctattgccaattgataatacgaggaaagttactttctccaatgaagtctcattgggtatgcaaaacacatttaagggagaccccacacccagcagtaaatggccaatacaaaatggatataaaagtatttttagagatgttttgtctcatattgctttgcttgggcacttcttttccaagttattgttttttatttaaaaagaacatgtttagttttatatcccaatctcactccttctcctgccctccacccttctcaccctgatccactcctcagaggggtaagaccgtccttggggagtcaacaaaatttggcataccaaattgattcaggatgaatcccctccctgctgtatcaaggctgagtaaggtatccaaccatagccagtgggctcccaaaaagccagtttatgtccttcagtacttttaaaccttaattgctgatttttcagttttataagttttttgtgtgtgtctttgtgtgtgtgttgtatttgtgcatgtgtgttttgtgatttttaattttttgttctctctctccctccctccctctcctggtatattctatcattggcctgttttttttcaaagttgaggaagaaagcttgaaattggatgggtgtatggggactgtctgagaggaaatgagggagaaaaaactgtgatcagaatatattgcatgaaaaatattttcaataaaaagtttaaaggatacagaaacaaaaagagggaatgttctggatatttttctaacaaattacatattgtagaagatgtaatatttccactgttcttcagttttgatggggcagatataatttatttgtcaatgtagttgacacctaacaaataggcattaattttaattctgcactgtacctgagactaaagtgcttattctacactaagaggagagagcaaattaaaactaaagacaaatgagttaaaagttaaaagttaaagacaaataagtcagaataaaaatgtattgattgccaccattccatgtgcaatgctaatatcttcaaacctgtgccaactgccctacaattacatgtctgtattttaatctctaagagattcataactctaactggaaacaatccttcacatatcctacaatctccttccccccttgataacagacttcagtcacagaagcttattgttgcaacttgcttgaaagattcaaatgaaatgacacattgtgagcaaccccttgttcaagtcagctgtttctgtgggtttctccagccaggtcttgacccctttgctcatcattcctcgctctttgcaactgggttccagaattcagctcagagtttagatgtgggtgcttccatcagctactggatgaaggctttatgacataaaactttattttgcattgttacagaagttcataacttgacaaattattaaatgcttaagtcctaacatctccatataaatttgccttcccaaatagtcctcacctacacttgttgcattaattgtaagtgattatgagacctagctttcccatattctgaaagctataagagaaagtggaagcattttaaaattattttgatgagacatctaaataatggaaaggtttgcaaacacatatacagtgcataaccccagccctagccttaaatcactcttccattgctggtagtagtacaaacttataaaaccacttagaaaatcagtatgatggttccttaggaaaatttgaatcagtctaccacaatatccagcaattccactcttaggtatatacccaaagaatgcacattcatccaacaaatacatttgttcaactatgttcataaaaacattattcataatagctagaacctggaagaaaactagatgcccctcaactgaagaatggataatgaaaatgtggtaaatttacacaatggggtactacccagtggaaaaaaaaatggaatattgaaatttgcaggcaaatggatggaactagaagaaaccatccttttggaaccaattctttaagaaagtcatttaaaatgacagttttaaagtcaaaaataaaaggcaaaagtaagagaagaagatacatcatctaataaaatacagcacaaagaacaatgcatagtgaaaatagaaaataccaaatctaaatcacagacacattatttaagtgataatcataacatgcagatcaaaataatatgtgataacaagaataataacaacactatttaatatttatatgaaccttaatacttgattggaactatttgcattcattgtatcatttacctcaggactgcttagtgaaatggttgtgtcattatcaattccatcttaaagagaagatggagacagatgaaaaaccatgtaaggagtggagcagggtttgcaatgccataaaagatttcaatctcatgcagcatgattcaggaactgaagagaaataatttacccaccccaagcaagagatgtataatcaaacaaaaattgtactagagatggaaaaatatgtcagtagaaacatatgatttaatttaaaaaggcaggggcaagcagaacctacaactcaattacatgaatatttagatcttcaatgaaataattaaacattctaaagttaaaagaattacatcatagatatttaagaatgagaagaatgtagaacaataaaatgtagaaaatttattattatacatttatcatataaaataaaaaataaatatgaagtctcaggggtatttttgatttatttaattataatgtacacaggttggattcagaggatgctcagcatataccaatccacttcccaagaattaactgtaattatgaaaatagcatactttaatcctatctttctcctttcctaactgttcttggtcttccctatctcccagcttagccaacttcatgttctttttctcccttgtactttccctgaccaaaaaaaaaaaaaatgagttgacaacagaaacctaaatagaaaacaaccaataagcaaaagaaataaataataaaccatatagaaacacacacacacacacacacacacacacacacacacacacacacacacacacgtgcacacacacacacgctcccacacatggaatccactgtatattggtcatctgctcctgactgtggggactacactaactgtggataaaagagtgagaagtcggaaaactgtgtcctaaataggatgtcttcctcaaacccctcgatagccaaggttcacgaatctatatggaagaagaaagtgaatgattttatgaaccagaagttgtagatgaatcagaaaaaagtgtcatccagacacaacaggccggatacacatattaactcagtcactgtgacagcacataccagacctccacaggttccaacctagaactgtaatttaattgtaacagaattataagtggaatcactttcagtttgtgctcatttaggatactgttggttatggaattttattatataataagagctatatagctcttcttgaattcagatatgttctttctatatttgcttagagatttcatcatcagggcatggtgaattatactgaaaatattttcaacattgtctgtcaaaaatcacatatttgggggtgttcattctgctgatgtgatgttattatctttatgttcatctaatgaactatttttctatttctatggcaatgactacatggtgatagcatatggacttattatttgtttgtttgggggaagggtgtgtgctttggggtactcaggtaacacagcacatcttttgagatcagaagacaacttctgagcctggatttcctctttccatcatgttggttgctgagataacactcagggtttcagacctggcaaccagtgtctttactcactgaattgtctccgtgcttccatataatcttggagtgtgttgttggctttgattgctaactctatcaaaatgtttgaatttatcctcctataggttattgatatggtgttatttttgtcttgatgtctagataccattggcatcagacaaactctagactacaccaaaagagttccccttttggttcttttagaatagattgaaaatacttagtgttcctgctgtctagagtttaggaaaaatctatcactgaacaggtcaggttcttgatttatttttcttaggaaaatttattttgttcctatgggggagtgtggtatgctgtttgtggtggagagcatgggtgttgttgcacttgtggtagtcaaagaacaactttcagtaattttttctttctttactacttgttgaagtagtatgtgaacttctgggtgagtcttaaaactctctgtggtcttcccaaagttctgagactgcagatatatcacacatatgactttatacatggtttctggggattgatctctgaccctcaggtttttgtgacaaggttttttatttgaaacatcatgccagctatcataaagtaatatttgttatcagttcaatcatgacatctttgtttggagtatcctttctgttagtttataattattcaaaagaattcccaacgattttctagatttctatggtgtataagatgagctaatcataccagttaacagaattcctactctgagagtgaccatattcaaactcattccaacagcacaaattttactgtctaatatttttatgtcagtgagtaatttctgtttacatggtctttacttcaacagtttgatggatatacctcttacccatttcttagttgttctatccagagtgggcaattcttgtcattcctaacatgtttcctcagaagcatatcaaagtttctctcatatgctttaaaaaatacgcaggaaaatacaaccatgtgtgcgtgtctgtgtgtgtgtgtgtgtgtgtgtgtgtgtgtgtgtgtgtgtgttcaatttgtgaaagaatggcaatttttttatctggtgatttttgtaatagaaacatattaatgctatcaaaaataagtaccacacattccactctctttagaatggagagtatgatgtaacaactcaggttattgtttctaaaatgaagatgttttagatatgaagccatcagtcagaagatttagtgacactggagatatttttgtagactgtttaagaatgaacatctgctaagacaattgcaaaattatgccaattttgaaatttagctggcttgttctgatgttgaaaatgtttaggaagaggacttgaccatgtgtctgaaggctgatttgctagataggtacaaaattttagaatgtctaaatacttcatagtgttatttctaattacttttcaacatttagtccataattgaattttacattaacttttgctttgaagacttgtgttaggatatcacttaccttaattattatttagtagctcattagatcttggcctctgatttatatgaaaatatttaacttatgtgaaccacattgctaccaatcatacaatgcaacaaatatttgtaaatataataaaggatgaatagtcagtcattaaatcttctgattattttgaggaggaatataattaaccatttttttatctgtcagagacaaggccttttatgaaagtctactcatgtttttattgacagtgaattccttcggtgcccttcagccttttcactgccctccattttcaaattattccaggattttagaatcttacagaactgtcagattgacttctgtgttcaaaatggtgcatggcagtacaataagcaaacatccaaacaaaaacaaaaattcaaaatttcaaaaaattataagatttaaatactataaaacattttgtttatcttccccctttcttttctccttccaatactcccatgtcctttctcttcaatacatcccatgatgccttctacttactcttaattccattgcttatttgtcattgatatatgtaaccatgataatattacatgtgcccatcccggctgggttcagcccagccagagactgtcagccaacaccagagtccctttctctgcccatgggatgagataagcttggcctatttctggccaaacttgtggtaccatgttcagagacacctgaggcctggggaatgtgtgctgtggatcccatccagcccagccagagacttccagccagtgccacagtccctttctctacacatgagacaaggaagaggcgagccaacagagtattggagttgcttccacacaccagaagggaaccttgggtctgtgcctaccaggagaggaagagaatccttctgcaaccacaggaagaagagatgggaagaagacaatataaaatcatattcaacaatagaaaaaccaatatgtcatcaccagattctaccacagcaagatctgtacatcccaatgaagatgaagcagaagagaagcaccttaaaaacaacttgatgacaatgatagaggccctcaaagaggatataagaaaatcccttaaagaaatggaagaaaaaaaacaaacaaaaataaatacaagaaatcaacaattctcttaaagaaagccaagtaaaaatcaatcaaacagatgaaggaaagagatcaagacctgaaaactgaaaaagagacaataaaaaaactgagggaatgctggaaatagaaaagctggaactacaggaactacagatgcaagtataaccaacagaatacaagagatgtaagagagaatctccgttgttgaagatacaataagaaaaatagattcatcgaccaaagaaaatcttaaatccaacaaattccttaaacaaaacatgacaaactaaagaaacacatgccaaagaaagtacaaaaaagcttacagaaaaccaaatagaattgaccacaaaaatgttacctcatcacataataatcaaaactccaaaacatagagaataatgaaagaatattaagagcatctaaggaaaaaagtcaagtagcatataaaggcaaacctatcagaattatacctgacatctccatggaaatccagaaatccagaaggccctggcaatctatagggcctctggtagtggatctctatttttccctagtacatgaatggactttggtagcccattccacatagtctagacacacagaaaagggtctaggccttgctccagatgatatgactctgaagatcccccatgaaaggcctcaccctccctggggaagagaaagaggttggtataagagttaagggggggcaggggaggagggcaggtattgagaacttggattaacatgtaaaaactcatttctaatttaaaattgttcaacttacaataaaaatgaaaactctaatattatatgcaaaaatattttacatacattatatataatatgtgcataaatataaacacaaccttgggagtttgtttagatttgcttgtgtgtatatgattacagggatgtccacttggtactggataaccaattcaggggtccattcctagaagaagccaattctcctctaagtattcattagttacctgttgttctttgtctagaggtgggatgccataagatttcccttactgcattagaatctcaactgatattaccattgctcaggttttatttttaagtattaaattgtattgtcatatcctttaagtgtcatgagcttaaattctagtcatttcaagaggacagactctcaaagcagatttatttgtcttcttggtatgacaactttctacccctcttacgctttccatgatgttttctcagcctaagttatatgaattttattatggaggtatccagtgcagctgcacaaaccacaatcagttgacctctgcattttgacttggtgtggttttctataattttctcattctgccataaagggaagcttaggcaatgagagacaagagctactcttgtctctgtatgaaaggataagttttagaatgcagttaggaattttgctgatctaaaagtggcatgggttctctaatccatgagcctgttgttgcctaggtttctagtgtgagacatcatgtcctccagttaaatagacattatgtccaattagagaggtgttggttactcacaaatatgaaggctactattgcatcttaagcaaaagcttgccatgttagtcagtactgtgattcatagttatcaaagttgcttagggctatttattgcttctctccactggcaccttgtatagagcagtcaaaagctaaaactcagtaaggagcttttagggcagatcctgtcatgtctttcatgtcctgtgcaaaagtgtgtaatgtctccagaaataaggacttacttactttcaacctatgagaggcaacaaagaacattgacaagtgtctttgctattttcaggctctcttgggctactcagaaagaaatttctcaaatggcatacatatatatggcatatatatatatctttcatatgatgtaaatttattcaattataaaaatatgatatatttttaattttgtattcttgtttgtgaaaaatggagtagagaaagaatgagtgtgtgcagtatgtatgaatcccaaagaagaccagaagaaagcatcaaatctcttggagctgaaaatacagtcagatatgggctagccaagttgggtatcaggaaccaaactcaggtcttctggaagagcagacagcactcttaatcactgagccatgtctcctggtcccagttttttagtatacaaatacatataatatataataatatatacactgtacaatatattatacacacatgcaaatgtactgattccatattatatttaattaatatgtgagtagaagatacagttagatgatatactggaaggtatatattatggttaaaactgaaaacttttgttgaatgtatttgtctcttacctcttctaccataaactcaagttgctacttgtcaataataaattataagttctagcttacaatgttcacagtgatcagtttcttaatcagccatgttcacaacttcctttcttggattctaatgtgggataaggccttcaacacagcttaaagtcaccatatgagcctttcaaatgacattttaaactgtccttcatgtcaaaagtcaaacttactcatccttcacataaaggcatatatagatatgttgagatgactcaacaacccaatgataggctttctatgagcgataaatcccattttatattatgttaaaattttatagggctaatttactattaacagacaggaaactattttaaacttaatttcctactgcatattgaatgtgcataaaaaagaaatatagcaactcataaataaagtggacataattgtgggcatgtgatttaaatacactggtcatctacattctccttttgcttagcatgctattttcttaccttctctgtaggttactgacatattttaactttagtatggccatacaaaagtctatgggaaagatttaagttaatcattgttttaaaattaactttctgtttttcttgatttatccacaaaaagaggaaaattcagtcacttccacaactggacttttcttctcccaattatgtacttccctttttataaaaaccactttttgtgtgtgtgtgaaggaactgccatattgtgttgactctttagcttgaggaatttgcaatgtgctgtacatttctttccacaggggaacactgaccttcagtagcaacaaaggttagagggagaaagatgaagtctaggtaatctggaaaggaagataaacaagaataatttcataggacctcagtctttctatctgaagtaactgagttactgtcatattccttctttcaaacacatacacacatactcaacacatacattgaaccttaagttttatcataacacaataacaatgcattaaatgaacattatttcctaaacctgtgtatttcccaactgcatctaaatgcccattcttatactcacagataagtgttccctcatcccttacaaaagaatcttctttttgaagtatcagaaaatatcgaacacattcacaggcagttacaatgcagagaacaactgactttgggttgccccatcccaattgatacatcaacagctcaagtaataaacataaggctgatggaacatcatagaagagggagcagaaaaattataacatctagaggaccagggcatcttctttcagatagaattttctacatacaataagaacttaaactcatgaaattttaataatatgattatctaaacaagacctgtaaaatgacaacaccatttgacatttcaacctgaattgggaaaatttcacattgccccatctctggatgaagacctaaaaacaattaatgagtgctaagaaaggggtaatcagttttccccagggataagccctctgatattttatctaatctaatctaatctaatctaatctaatctaatctaatctaaagtggttgggtctaaacacatacccacagaagcaacaccaaatggagtcagcagtttgtatttatgtacatgtatccacatctgtgtgtgcttaccaagaataattaaatcaggagtttccacgagtttgagagtgggtgcataaaatgggttggaaggtggtgaaagtggagcagaaattatgtaaataccatacaatatgtagtaaattctcaaaaatgtaaataagtaaaactgagtggtgtatcaactaagctaagacttatgatgaagggtctaaaacagacaagtaaaaaaaaaatcataaaatttagactttgaaatgtttgtatagtttaaagaagaattaagatgattaaatgcatacataaaaatcaggagaggttagtatcacctctgtcagttatcttataaatttaaaattttgcagaaaaaattcttcctgttttgcaattttaaatctgaattatttattacatatttgtgcgccattttcaattccataattatacaatttaaaattattaaatgaatatagtagctatccccagacacggagaagtatgtcttttactaagaacaaaagttcagctaatgatggaatgcagttttgcaaaataatgtaaaagatagaggctctcaactagaaacaatgctatatatagtcaagtcctaattatatgaatttgaaaagtgagtcccatggttatgaaatgctcacacttaataaatagaatgtaatgtatatggattatatgcatctgggtttataaatgctgacaataagattttgaactctcattccactgttataaaatacatgaattttctataaagtcgtgtattgaggatttaaattggagaaaactcattcctagaaatgcaaatatgagataagacacaacttacttaaataaataatagatggataactatgaaaaatgctaaaaagataagtctgtatcatgtctgcttgcagtggaaattctgtctccagtgcagaatgaataaaaagtcagtttaagcagagtcatcacctttgcgagctacagcctaggttctcttcttaagcgcagtatcctctctccagctagtctttgctgggttcccaaaatatgtcaatcagtgtgcctcgtcaaggcacctaggagtccaaatccttagcaaaatgtctttgatttcattaaagttatgaaagggaacacaggcaggaaaaagttgtgtgtctcttctgcttcataatttcatttttatgttattaaattgatttaacatatgggaatcatttaacacaaatatgattaatgtgatgaaaattgaagatattacacctatcatagtatattataaaacaagtggaaacttatggataatatcagtcaactgaggtgtgtttaagaaagacaaggagtcatgcaataggaacacttcagttacacctaatattttgatgatggtgatagagaagcatgagtgttaaattgtcagtcatcttaaaatctcttgtatctatcataatattgtttatgcttcaactgaatatacaaattgacttgaagataacatatttttgtattttacaactataaatatgtgtttcttagttgtccatagtttcaattaagaagaataagcccagagatagcataagaatcactttgtcaaaatagtgtaagatatttaaggcaaacatttaaatatgacaaaatattataagaaattataaatgaatagaagaaaataccatttgcttgagataaatgctaagaaattaagatatacatgtaatgaaacaaaataaaatgcagtttttatttataaacaagttgtcattaacaataatgcttcaagaattatctttggatgaatattctgcccaggaaaaatacaaaatgaaatgatcaataaacacaaacaattataagatatcctgtaaaggccaattatgtttatataataatcaatttacaactaacaccacagaaagttcatactgttatgcctgctcttgttagtggagtttgaatgaggtgaatagatttctaatgaagcaaccgaatttcccattgagaatactgtgcaaaatatctacatattgacttggaattttttcattaaataaatgttttatttaaggcattgatataaacccggggtaacaattttataataatcatttatattaatattttgaggaacatagacagggaataaaatgcataagttcatgcctcaacccaaacaactttattcaataatttaacaactgtttactgatcccctaatggtattatgcggaaatgtactggtgactaagtttacagtggaaaacaggacacaaacagccaatagtgaccaacaatatttagtaagcttttcctaggtcctaggcagacattgttttattttgtttttaccacaactctgtctctgtctctgtcactcagtcacacacagacacacacacacacaagacacacacacacacacacacacacacacacacacacacacacacacacactatatatatatatatataaatatannnnnnnnnnnnnnnnnnnnnnnnnnnnnnnnnnnnnnnnnnnnnnnnnnnnnnnncctttccaaggctctgttatcagtcgatgagttagttaatgctagtggataaactcataacagaactccaaatttcattcttcttctctccatactggccttttcctggacattaaagtctggtgggttagaaagataacaacagtaagatacatgtttcatgttgtcttccaggatcattggagagatactctagggctagctgatcttttttacattaatgttttaattatttcttgaacaattcatgtaatctatattgacaacatttagtctctgaacattggaattgtatccatgagtgtcctatgaagggtcacttcccagtgattgtagagacctggtgggatgctgattgccttctgttgcttaccagagtgaaccaagtgggctcagagcaacttgtaatcctactcatccctgatgaggctgaaattcaataatcgtatgcaataaaggtgcagctgattacacagatctatccatgggattgtgagcctattttaaacatacattggaatatcacattcttattcattataatgtactggaattatatatgatatagtcagtagggaaactaagtgaaagttacatcagactcctctgtagaattgtttcaacctgatgctaatgtatctttttaaacaacataaaatccccacaaaattcaaaaggaataaataacaggggtgacttttcaggggaggcatacccaattgaagaagatctcattcccatactatataaactgttacccaaattaattaaagacaggcagaaatataatacactagacagtaatttcttaaatggatgtattcacatacataaattgtgagatttgcacaacataattagttattaggaatgtgaaaattaaaatatagtaatataggcttttgtgaggatgtggagaaatgtgttttcttaaaatgctgagaaaaacacaaacatgtattacatcatgggaaataattacttctttatgtcaaggttaaacatatggtaagttattatataggaattgtactgcagagtatatagctaatagcatttacatatgctaaaataaggctacctgtttatatacagaattgtgtgatggatatccctctactggttattaatatttatcaaagcaacttaaagaaggaagggcttgtttattccttacagttctaaggcaaagttcataatgacaggagtgtcatggtaacatggatatgaggcatttgatcacatgatatctacagtcaggaaaaaaagtaatgaatgcaagtgcttatattgctttctatgttttattcagttggggagcacagtccatggatgggtgggaaccttagtgaacctgggtcttcttaccttacttaacataactttggtaagtgctcataagtatgtctataggttggtttcctaggaaattaaagattctgtacaaagagatttttctatcccacattgaaaatgaaagggataattatatggatattgaagacagcagttttgaagagagcatttgaagttcactttaaacaactggacctaacagttctagaacaaacactacagaacccaataatacacatcttctcataaagtgcttaaatgacattctacagaatagattccatatcaggccacaaaataggcatcagtattttattgaagacacattttaatacaatatacaatacattctgatcctaatgtatttttcaaatcatgcaaagtctatgttagttttcctttcttcatttttcacagaatatctctttgaagcccaggcttgccaccactagagattccttggattctacctctcaaacgctcagcatcaagcctagctaatcacaacaagatgaaactgggaatcaataggagggaaaatatagaaacacatgacatttaattggacattctttgggccatcgattgattacagaaagaaaaaaaaacagttacaaagggaattagaattaccttgacacaaatacaatcaaaggagcatacccaaaccttcataatgtaacaaaataagcaattaatcaaaatgtatcttattaaaatggctaataaaaagaagaaacatttaatggccacaacctatgtcatattataaggcacaagtgaacttgggggaagatgtaaataatggattttgaattaaaatagacaattactaacaagggaaaagatcaacaaagctgtctttattttcaaaagaaaaagaaaaaaactacatggaaatgataaatatttatttttcccacaaaataaaggaaatgtacaatgtactatggacattcagtgttgttaatatcatattgtgtgcatcatggcaattatggcaaaatatcctttttgtactaaagcctagtcttacttttttactctctctctctctctctctctctctctctctctctctctctctctnnnnnnnnnnnnnnnnnnnnnnnnnnnnnnatgggatgtgtacacacggcagtgtgtctgtggaggtcagagaaggcatctaggaatcacattcatctgtcttggcaataggtacctttattagctatctctcctaaccctggaaaccctatcttggtacctttattcctttattagctatctctcctaaccctggaaaccctatcttgaatcatctttactggcaggcttttctgtttcctttctttcttttcttagatttgtgtgtgtgtgtgtgtgtgtgtgtgtgtgtgccgtgtgtatgaatgtatgtagtgcatcatacgcatacaggtgcctggaaatgttgtcaaaaatcctggtgctggagttacaggtggctgggcgctgccacgtgaattttagaggctgaaacccaagtcctctgtaagagcagaaagtgctcttaactgctgagacatcactcaagccctgtgattcggttttgaatttggacagggggcattttaggtagtattaccaatctacctgtacatacactaccaggtctgtcacagaagccaaacaacacatatagaatgaaatgttctcactatgtatttctgtattattttatgctaatatataacataggtaattaaaagatagttaaccataataaataataaatataaaaatcaactgaaatgagagtggcttgaaatttatgaattacatattcatggaatttccaacttaatatttttcacctgaaatggtcaagaatactggaaactgaaaaatgaaaccagaggccaggatgtgggattactcaagtatactagtttttctgttaaaatttggtgagaaattactttctgctatgtatcatgataaacttttattttcttttccttttttttattattaattcaagttagggaacaggcttgtttcacatgtaagtcccctctccctctccctctcctcactcacatccctcctcccccacctccaaccaatcccaaccccatccacctaccactccccaggcagggtagggccccccacaggggctccacaaagtccaccgaatcttcctgtgctgggcctagacctctccccatgtgtccagagacagagcgcatcccttcacatgggatgggctctcaaagtacccccccacacacaccatggaaaaacaccagttcacctccggaggctcccgggagtgcaggggcctccccattggcatccatgatcagagggctggatcagtcctgcactatcctcccagacagcatctggggtcgatatgctttccctttttcaggacaactgtttctgtgggtttctccaacctggtacagaccccttcgatcttcattcctccctctcttcaactaaattccatatttcagctcagtgtatttctgtggatgtctgtctctgcttccatcagctactggatgagggctctaggatagcatagagagtagtcatcaatctcattctaggggaagggcttctaggctagcctctcctccactgcctggactgtcagatcgtgtcatccttgcagggctctagagatctccctagttccagatctcttctcagacctatagtggctccctctgatatggtactttcctctattcttccccctactcaatatatctgctcctcctctactcttcttcttgtgctcttattgtggcagcaccctctcccctaccctcatgctctcaattagctcgggagttcatgccacttcccattcctgtggtttatttatcccttagagtccttcatgtttcctagtttgtttggtgaagaggattataggttggtaaacctttgctctatgtctacaaatcatatatgagtgagtacataccatgtttgtctttttgtgattgggttacctcattcaggatggtttcttatagttcctaggttgcttccaggttctggctattacaaacaatgctgctatgaacatggctgaacatatgtccttgttgtatgcacatgcactatttcggtatatactcaagagaggaatggatggatcttgaggtagattgattcccatttttctgagcaaccaccatactgatttccaaagtggtcttacaagttcacactcccaccagcaatggaggagtgttccttcttctccacacctctcagcaagatgatggagaccttcaaagaggaaacaagaaaatcccttaaagaaatagaagaaaaagcaagcaaaaaatgacatgaaatggaggaaaagagaaaccaaaaaattcaagaaataaacaaatctcttaaagaatctaaagaaacccaagataaaacaaccaaacaagtgaaggaagctcttgaaacagttcaaagcatgataaacttttataaagttcaaagacttgaaacattttggcaattgaaaattggtttcagagtgtaacttgtagtgagacactaaattattgttcattaagagacccctctgagctctcagaaaacatagccattaactagccagtatctatttcctattaaccagaaattcaaacacaacaagtcatttgacctctgccatcactctggtcatcatgctaagagggcaatgtgtttaactgcatgaatataaacctattttaagttggtgacattatgtttggatgaccctgctatcttccaacttctcacttaatttgtgaaaaaatcttggaatggggactcctttctaggccattttattcacgtaaatgatgagatttcaagggaccatacactctgtgtctttctttgatcctaagtttctctgcatatcctgtcttactgaagccagctacagtgcctgccaacaattaccatgtgtggtctttcacttatgaatacaatatatcagttttttaaaacaattaacccttcatgtacatcttaagcctataacttaaataagagaaacagatgaagtcctgagagaattgtgttatcaccatgagaaagcctgtgtcaagaaccccaaggcctcaaactttgaaaaggcaaacctttcccatggtaaagtatgatgctgatgcatgactgatgtttaagcaaaagcagtgtttgcagaaagtattaactgcagcttcctccatgaggatgattgcaaccttaacacattcccttacagaaatctatctcctacttaacatacttaacatagcacttcccctgccatctctgtacaataaataccatgtactcattcagctgtagacaataattccatctcttcactcagcactatataataagcacactgagcttgctggctgctagtacttctccatctgacagctctgtcccccagaccccagattttctacatgcatattctgtgtgtttgccctttcttcattattatctcattgccccagtcaggtcaagtccaatgctgttcaggtttcagcacctagggtattttacacatgatttcttcactaattcatgttgcatggctaatactgttcttttatcctgtccgcttgagattagcaggatactagatactttattctctgtaccaataacaaggaattttattttgaaaacaatgtgccagagttcaccccagtaccatctaatgactgcttttattttcttgattcactatttcttttaaatgttagaaattaaaatatttgagttctccttttattatacagtaatttcattagtagatgatctcccaggaattagtgatacatatgcaattctaagttggtaataccaaatgctcaaatgcattaatactttgtacaaaactactgtagttttctgttctaaagtataaatcatctacaaacttccttcatatttctacttaaattactctctatataaagtttagtacagtgcagattccacagatatttgaacaccaagctgaaaaatatcacagcaattttctgccagatgtaatttggtatgctataaacccttgaaaaatcagagatgatagtgaatatgacaactgacctttagttataatatcagaaatgtgataccataaagatatctgggcttgttttcttctgtgaggccatttggggaagaaaaagaaactaggtctgaatatttactaggaagggccataagtttatgctctatgtttccctgacaatgcacattagaatagattttgtgctgccaagcatttatcaaatctctctgaaaagcaaaaccacagctttgtttttattttgtttgattttttcagcaggcagataaagtatcatttatcatagtatgtgagaaaagcaacagggcagacaagctgtaaatctcagcaggtgctggtgggagagagatgaattaatagtaagagagaaagtcgttcttttgagtaaatgtttaagaaaaccagcaagcttagcaatggacttgttccttaaatgaacagaattcaacactggatgatttgtgcttcttttaatacagaacctaaatgtttcacatgccattcactagagaccaggataagacaaataaataatatatttatatagagatgatgttgtgattagaatgtgaaatgtcttatatggactcatgtgtttgaacatggtgatgatgtttggaagagttaagtgagtccttgggagtgatccttaaggttaggattagcatctgttcccacttcttgtgtcattgaccttgatattttttgccaatgcaaaattcattgtttgtacttttatcttgtgtggttcccactgacatacgtagtctccctgtgggtagtgccaaagacattgctgtatggttaagtctaatacctatgaattttccaagaaccaatacatatgaataaaataaatgaaattatttggattttgatttcttgtttatgacttaaagtactgaaactattaagactccccatttattcttctttatccattctttacttacttatgttaacttgctatatattgtggaaaatcagaatatgcctcttggaaatataattttattaaataaagcaaaagaaacaaattcatgagagtgctctgttctttatacatacataggatataaatgtacaaaagttgagtgctgggagctagttcagtggttaagagcactgctactctttcagaggactgaagtttggtccccaaaactcacatggggtggctcacaactgcctgtaactccagatccagggtatccaataccacattctgacctccactggcatctgcccatacatgtgcacataaataatacaataaaatgaaggacagctataaattttcatcagcttagagaagattcaaggagaattcatatgaacaatccgggccagctacttttctgctacttgtttttcttcctccaaacagctgtccatgtaaagtcatattttttctttttataatagttcttctgtgtttgtttcctttccccaaggctgtgagtatatacttgaacataaaagaaatgtaaggaaagaaggttctatttagacttgaacctcaaggaaatatattctttaatgactgacaatgcatagtgacagaaacaagcattcagctggtcacattacagtcacactcaagaaaagagaattcacagagaaagaggggatgtatggaaccttaagttctacttgccaggacccacttcttctagttagagtcggcctcctaaaaaatccataatgttctcaaacaccaccactagctgaggactaagtatgcaaccacaagagacaatgggacacatttcatattaaaactatgacatcagctctataaaggcataatgaatttctgcagataaaatataaactagaattctaggtgaagctttaggaacaactcttctttgagtagctctcattcatattatagcacatacatatatgtgagaaactatttttagcatacataaaacataataataacatatgtattgcatggtatataatgcataaaatatattatatatgaaacataattgttacatatgctaatacatcaaataacatatgttaataaatctgtgcatgttaataatatatgtaaatatatgttaatgggtaatagcaaatatatgttaataagcttcttcctctttagtgtcaatctttatttctaacaagggcacatgtcaattattattcctaaaaggctgctacttttcacctagtaactcaaggactgaatacagtggtgagcgacacagcatcataggttctaaatagaaagaaaattgtgcatcaacaactgtgccaagcagacaaagaagataatgtttcaaagaaatacaactcaaatatttttgcaacaaaattgagaaagaagaaattctctctcaaacaaatgcaattcattaaatatttcaagtggaaattttcattcactttcatatgttaaatccttgaactggaatctttaaatatttgttatatttttgaaattataattataaaattttcaccttccctttactccttctaactcctaccattcatctctcacctttctttgtctcagattcatgaccactttattcctacacagttatgatgcttatgaaccacaacagtgaccagcatggcacaataatcttcagggtacagtatgggcatgcataacttggtagtgaccaacagttttcttattggcctctacatcagctcaacaagagggaaacaatgagtgatgctgcaaacccagccagaggctttgggatactgatgccatggatcttggaggagaatgtatttagaaccactttactaaacaaacagtccctacttactttccataactttatactcacatataagtagagctcttgatcttcataaaagaaacttccactttcaacagaatttacctatagggtcacttgagtccttggccatcatgttcatgaagaagttatagacctgccttctgtgtttctctgaatcttattatgtagaacatatttatccttgcaaataatatgacctttaactgaagcaattaagtatttgatatgctatatgaaagcagttcaggaactgaagtgttcaatgttgagctacagcagagaaacatttattattcctttgtatgttgtcttgtttatcagaaatttctctcctgatgagagtgcatcaatataaaaattctactgtcatgtaaatacttctatatacagggaaaaaataattgggccatttcctttgattttcttcattaggactttccaggatacccagaaggttcttattctccttgagccacaaactctagctccttaaagagaggggatgaagaaaaacaaaatcttgttattatttaaattttattgtacaattttaaggtacagaatataatgcacttaaagaaacaaaaacccaaaatgctaggatttgaactcaggcctcacatattccaggcaagaatcctggcttttaagttaaagaccaggaccttttaaaacctttattctgagatggagtcttttatcattctctcttcccatcttcttccttcctttgttcatttatttctttctatttaaggttgcttacagtattaatttgataccatctccctgtctaccatctttacccttctcttctcacatagactttctttgttgtactctgagccccaataagaacacttcctaataattgcatgatttttgttgttgtagtttgtttttatcacttccaaggaaatggggcatcctgaaactgagaagattttgtaaggcaaaggacacagtcaacaagacaaaatggcagcccacagaatgggaaaagatattcaccaaccccacatctgacagagggctgatttccaaaatatacaaagaaatcaagaagctagtcaataaaacaccaactaacccaattaaaaagtggggtacagaattaaatagagaatactcaatggaggaatataaaatgactgaaagacacttaagaaagtgctcaacatccttagccatcagagaaatgcaaatcaaaacactgagataccatcttactcctgtcatgatgggtaaaataaaaaataccaatgacagccaatgatggagaggatatcgagaaaggggaacactcctacattgctggtgggagtgccaactgatatagccacgtggcaaatcagtatggagattcctcaggaaaattggaatcagtctaccacaagatccagcaattccactcttaggcatttacccaaagatgcacattcatacaacaaggacatctgttctatcatgttcatagcagcattatttgtaataaccagaacctaaaagcaacctagatgaccctcaactgaagaacagatggagaaaatgttgtacatttacacaatggagtactactcagcaggaaaaaaaatggaatcttgaaattctcaggcaaatggaaggaactagaagaaaccgtcttgagtgaggtaacccattcacaaaatacaaaaatgctatgtactcactcctgcatggactttagacaaaaaaggtttaccagcctacaatccacaccaccagagaagctagaaaacagggaggaccctaagagagacatacatggtcccctggagaagaggaaagggacaacatctcatgacctaattgggagcatggggggaagggagaggcacctagaagaaagagaaggggacaagaggaggggagaggaagacatgagaaagcaggaagatttagtcagggaaagaatagaggagagcaagaaaagagataccatactagagggagccattataggttcaaagaaatttatggcagtaggaaaatgtccagaaatctaaaagattgaccccaactaacaatctaagcaataggtgatagattaccttaaatacccttctccaataatgagattaatgtctaccttatatgtcatcctagagccttcatccagtagttgatgtaagcagaagcagacacccacagctaaacagggagctgaactctagaatccagttgcagagacggaagagtgatgagcaatggggtcaagaccaggcttaacaaacacacagaaacagctcacctgaacaagggattgctcatggaaaccagaatgatagctgggaaaccagcatagtactttgccagtctccctggatgagaatgtcaggttgtaggtctgggcaatctttggggcctctgatattaggtcatgatttatccctactatacaaatggactttgggagcacattccacatagagggatactctctcaacctagacacattggggaggttctaggccctgatccaaatgatatgacagactctgaagattcccccatggaaggcctcaccctccctggagagcagaaaggtatagagatagagggtgggggtaggggaggaggcaaggcagagggaacttggattgacatgtaaaagaagcttgtttctaatttaaaattggtttaattacatctataaaaattaaaaaagataattttctaaagagaaacttgggtatctcaatctgacttcattccattgaagcaatgaatctgcaaaaaaaatggaaatttcctcaagtatctcatactaggagaaagaaaatgaaacaaaaagttggtactttgtttcacagaaatacttgttagacagtagtatcaacttgactcacctccttataggatacaactgaagactatacagtgataggtcaatggtgggtagaccacatattggcctgactgcttagatgtacattttcttgacctcttatttaaactttaacatctatttaggacaccagaaacagactggaagagattgctgggtttaattgtccgtctttccaatatattcatatcgaatgattctcctttttctgctttacactattaatttggcacctctaattggtttattgaacatgggtgcctgagccagacttaggccaaagtcttgaaaccaaagtgtgaaaacaaatttacatttcatttatttgtgtttagaacaaatgaagagaaaatgatattgtaataatttaaaagaatcatgatttattttcatgaatatttgattaacaaacattggcttaagtcagatgatttcttttaaagattatggctccttttctgaacaaagggattaagaacttaaggagtttttaaatatgcaaaaatgttttgttatcattgcttgaaatatctccatgtaacgccctgtatgagaggcagatagatacggtgatacgtatcagggacatgtctccagttgaaaccatagcaatgcgatgtcagggtcttgtttggccatctgcattgaagtttgcaaacagctggaaatactgatgccctttacacacctctaggaaaatgtctacagtccatcagttgcaggtgtttatgtcctgtttggactgttaaacctagattcttctgtaggaaaggggaataggttgttggaactcagctgctgccaagggccttacagattcattcctgctcccaaaagactctctcttctcaaagtcctgctctgatgagctgatatgtttgtattactcctaattctcccatcctatatagggtgcaacctgacaccaggcaagtggcatagatcacatgttcatcaatactgaccaaagtttctgcctagggattaggatagctcctcccactagagttgatgttttttagtgcaactgaagcctctcccatgctttggctctctgccacacaattttgtgccattaataatttctgaaagctcttattcgaaggagctgctactaagtacctcttgagacctttctcttagacctatcccatttctggtctctccatttacctaacagaggtattgctaagtcagagtctgaatgaaatgctcttgaagaaccatataattcatggcattggctttcataaattctatttaatgtttgaagtcagtaagcatgatagaaaaataaagacttagctatgatatttccttataaggaagttgtctatgcacatgagggaaatgaagcacagagttcatcttagcttgataaatgatgatgagtataatcagagatttagacttatagtctacactgaactatgtcttctcccttgaccctctcaacaatggctgctcttagaaaaaaattataacaactctttcagtttctgtttaaactactgggtgatttagggaaaaacaatgggggatataagggagattttggtcccagagactaagccatatgttgttgtcatttcatgaacatggaagttagatcttatgcttcagtcttccacttagcctggaatgcagaggcttcatctgtccttcttgatgattgctgttcaaaggataactctcaggtctctaagaaagactgcctctattgaaaagctagcaagatatttttaagaatgttaacatatgaggcagagaaagaagtaattagaaaatgctttccaagaaagacacttgacaaaagtgaattccagaagtagaaaagcaagaccaaatgtgtcatggagagtaaagacatcttagtcactatcacatggttgggaattatgtagacagggcaacttccatcacattaagctacctaaacagatcacaaggtccatatgaacaaactgtaagtgtcagtacttccaatcatttcacacatacaaaagcaaaagtttcactagttcacctccaacaatttaaatgtgccaaagctgagtcttttctaggatgattactaatgtcatcttttcatccaaagcaatgaatttgcatcctggtttattcaaagccaaggcaataactccatagacataaagcagtagagaaaaactcattttctctggcatgtagggagagaatgggaatttcttctaaagcaatgccctcagagacccaaagaaagcataaggctggcccattcctaagaatgctctattgagctgtacattccattttaagttaatgacataatttaagaatatctaggagatgaattttatggtatgctttgcttaatgccttaaaacacacatttaaaaatgtaaaatgttagatgttgaaatctctgggaatgctcagccagcaccatatagtggtagttgaaaataaaggatattttgaaggtgttattatggtctttaggatcaaagcctgagccatagtggcccagagacactagactttaccaactgtcctcaatgcagcagttggagagctaagtactagtgcaaacaggaagaatgttttccaatgtggtcacatggggaagaagaacaaataaaagctacagtgactcttgtaagtttgtgtttgtggtactgacataagattttgtttacacagaaggggagaggtgtgcataactaggcattccatgtaggggatgctgcagccatgcctgcttaggggctggctacaggtgtgcttgaccacacctgggagggcatagtcaggatgacctagagtaagggacattcaggtggtggcttgctgtagggtttactgcccaccagctgaaaaggtcacactgaaagtaaggcttttccttattaaattcccttgtatttttacctggctccatattggtaatttcccacattatctggttgttaggaatgggatattgtaaacctaggcccctttgggatagcctgtggttccaccagtacagtggcctaggccaggaaagcaccctctctccacaggtgctcccggctcacagctgacctgctgtgccacaagtgcattcccactgctgctgagctgctcagaaccatccgcccagctgggagacttccacagacttccccacagttactgtcgcagtttctagctgagtgcatgggacctgttcagactgctgcctaaccgagcctcctacctggaagctgcctgcccttgagccaagtaggcctgaggagtaggccttggctttcagcagggtctgcggcttcccctggccacagcgcctttacagctgtgcctgttttagtggttgcagctgcaaggcagtatactctctaagcccagcattgtcacatttgtgacctctctccactcttgtcaccatcttgcctgacagacctctgtcaaaagtcacttggactaactatacacctctgtcccctgttgatcaaagatacttactcatctggagaagaactcaagtaaaatcatggtggaatatttatcatttgctaaaattggtaatatttttgcttattatgtgaattcagtgtttgaggaggacactaatctgccaattactggcctatatgcagtgatggcagttagcttactggtacaaataaccttcctagccagatccctctggaacagggacaaagataacctcaccacctacttacaggaaataacagctttatgcactgaggttttggagaacagattaggtcaggccacaattgtgcttcaagtggaacagaaattggatgataagcttggctctgtgtccaatacactaaagacaaacttgtctgttacccaagatgagatgcagcatatttatgataacataaaaacagagagatgctccatgtctgaggcattagaggataggctgtcagaggaccgtgatgaactaaagaatatctgtagccagttggaaactcagataggctcggtgacccagaaattagatgcaaagttacaaaatacccaagatagggttgaagaattggacaatgtcattcaatcaattattgaagcatctaaagtagcagatcacaaatttctatctatgtttggaagataatttacaatacagggctgatagattagataggtccatatggtcgattgctgaggactcaaaatcagcaaatcatgacctcaaatctagtctctaataactaggaggcagtttccatgccatccagatcctgcctaaggatgatcatattaaagacctagaaaaacatgcagaggagcagttagagaaatttacagattcactaacatgcttggaatcttttaagattaaggagattgaaacttttcataaggttatcattactaggcttaaagatcattgggatgcctcagaggcagaatcactccaatccaagacacctactccacccaggtatcatgactattcttctaagattattaccgatatgcctttagtctacccagctaccatggtagaaaagccagcttctaagaaacacactcagagacagatggcttatgtatggcaacctatactgatgaaggatctgaagaatattaaagaagcagttgtctcatatggtctccatagcccatatgtaaaacagctattacattcatggtcaacctataacagggggacacccacatattgggaatgattggtagcagttgtacttgagaattcacgcaaatccagtggaaggtattggtcaggaaagaggcaaagctccttgtgcatcaaggcataaaggaaggttaagaagcccctctagataagattcttggtaagggtatttgtgctaacccacaggctcaggctgaatatgatggccatatacagtccctatgcaggaaagcagcattaaagcctgggataaggttcatgagccaggagaacacctagaagcttataccagaatagaacagggacctacagaacagttccaggtcttatttggaaggttaactagggcagtagaattacaggtaacagatcctgaaacaaagacaatcaattatatatacaatagcttatgaaaatgcaatcctaatatgcaaaagaatacttttgcctttaaagaacagatcagctccactagaagaatgagttttgcatgaaggcaacattgacaagataccagagcttgggaaggagaagctatcttgaaaggtttaaaaaggcaagaggatattaaaagttctagaggtgaggccacaagggcttgggaaggagaagcaacttacagaggtcaacataggtaccaaaaggctagaggttgctactactatgaaccagaaccttgggtaggaagagccttccccaggagaccacaaaggcgccaggaacctagatgtttcagctgtggtagaatgggacatatgaagagaaattatagactaacgaattctaacaatgcctcatatggaaggccactgccttctggattgtgtagaagatgtggtaagggcaggcactggaccaatgaacgtagattgaccagggacatgcaaggaaacctctttgtttctacaattacaggaaacaatcagaaacagaattaatcctctatacattacaaatatcagatcccataggggtctgccaggcccactagcacaaagcaatgttgagattgatcgtttattgattggaagtgtcctagaagcctcaatatttcataagaaacatcatgtaaatagcaaaggtttgaaaaaggacttctccgtcacctggcaacatgcgaaggagatagtgagaaactgtcctacttgttccttttataatcaaattccattgccagcaggttgtatttctaagggaattcggagaaatgaggtttggcagatggatgtctttcactttgcagaatttggaaatttgaaatatgtgcatcacactatatacaaattctcagagttccaatgggctactgctcttaattctgaaaaagctgattctgttattaaatgcctgcttgaggtgatggcagttatgggtgtacctgcacaaataaaaactgaaaattctccagcatatgtctccactaaattggaacagtttttcaaatattataacataaagcatgtcaccgttataccacacaatcctacaggacaagcagtggttgagagatctaatagaacacttaaggagatgctctacaaacaagcttggaagattaaaccccccaaacataggttgcataatgctttattaacactaaactttcttaagtccaatgagaaaggacaaacagctgcagaaagacactggactatggaaaaacctgctgaactgaatcagccggtatacctcaaagatgtactaacctctgtatggaaaccaggacaagtggtacaattgggtaggcattttgccttggttgccacaggagaataacattggataccatcaaagttgatcaagatttcagttgtgaaggaaaaacctctcgacgaggataaatgacaggtattttactaatgtataccttataaactaaatagaaacctcccaaaggaaattgaagtgttttgcttttatcttgacagataaactcatctccagaaggcaaaggacactgcatgggtagatacttaagaagagaaggtagctataaccatcaaacaaaaggaacgtgccatacggtaagcttcatagctgtctcccagagaactctatttctctttatttcctagtccctattcaaataaatcaatgttggatttagatttagatttgcctttcctcctctaaaatccaagcacgttgtttaaactttttctagagtttctgtattatatcaagaagccaattgatgtaatacagaataagagaaaaatttgaggactatgtttgtcttttcttggctctttctttcaaggtgtataccctttcataattgttgtcttttctggtatgcatacttacacaagcaaacatttctctgctgtttatgtttgagttccacacagctaatgaagacatgcctgacagcaatccctggataccgtggaaagaaaatgggccacacttccttgactgcactggatccaacttgctccattgcaaagcacagtctggccagaggttcaggtactgacttcaatcacgttgaagatttcaagtgagattttcaatcaagcgaatcccatctaacatggactggatacaatacattcaagactttcactatacaaatattttctttctacatggcctcacaaggctgtcatcatcccatttctgcaggaagtaacttggaggatgttatgtccccttacccccatgttgtcacttaggatagtgtataacctagttaggggtagcttcctattgtttatggttgggattggaaggaggtgttcaggcttggacacctctttcagatgactttagggtatagttaaaatagacatagttaggatatgacataaacagattattatatcttcttatatttcacctttatgattgttaattttagatactttacacagttaagttttaatcctcttttagactaaaaggggtattgtaggggatactgtagccatgcctgctgaggggctggctacaggtgtgcctgaccacacctttgaggggaaagtttaagagtgaggcggctctgctttcactttcgtcttcagcttgccgtatggactgctgccgagatcgctctgtaagtaaggcttttccatattaaattaccatgtatttttacctggctccatattgggaatttcccacattaattccacatcacagtgtgatcctgaacatcattggcccatcttttcttcagctgcgggctgccttcaagtcctcagcattgtgaaatctctccctgctaatatgctcctcttctgcctggcataagggccccggcctctctgtttcttctgtgtaagagtccagaagaagttcaattaaccagaatcctgtttcaacagcctggtagacaacaggagggacacaatcatctcctcagaatattttctctcctgttatgtcacttacaaaggcacattaatatatattatgagtatgcccctaacaagttgaacccacttagtggttataaacttcagcagagaagttcttgttttcataaaaaatatttctcatttttataaagcatttaagcagattaattaatgtttatgagatttattggtcattgaggcagattttaaacaatatttgagttccacattaatgaaagatacaattgcaagtcaaggagtcactttgataaactacctttcatttagcttgtgagtcagtaatgtcaaagatgattgctgctaagtaactgaaatggtttcagatattggcagttgatggatttgccaataagctttgctgagatcgtcaatagccttgacccacctataactagatttgcatatggagattcttataagtcaaatgttaaagacaaaaaagactatcactctaataacataaatgcaggttcaggaaaggacatgagaattcccttcaaaatgagctttattaggagggagagagatggggtggaagagagagagagagagagagtcaaaatcacactggccatgatcagaaattgaagaaagagatcattagggatatgtaacctcaccctctaaacagaataatgaacatgtgaagtgagagaagtggcctaccgttcaaaagctgactaggagcaaccttagtagagacagatatcatgtacaatatgatggtggacctaaaggaaggagccttttaaacccccaaataaagttgatttctgagttgggtgtgagtggcagaagttctgcaaagcatagtttagttgtgcctatcacatatgtcacagaggtaggccctaggtaggactataaccttttcttggagttacaaggaggaaggctaggctttgtttttccagttgagagttaaaagattttactagtctcagacagagcctgtcagtcttttgttttaaaagagaaacctgggggtcttgatgttttatttggagaagagtgaaaggcaactatatgtctatggtctgacagttttatataccaaaataatatctcctgtccagagaattctataggaaaaccttaccattgggaattttggtcctatgctgaggtagaaccactgcaggctaaagagtacgatgtctattggaaattaagacatcttcatgtgagataggaaaaaccttctgcaaatagagaagatggaggcaacctgagggccattagccctcctcctcagaaaggggcagttgaactgtctagtcactaattgctcatcagtgcatcatcagtctttgtcccattgctttatacaaactataagacaccatacaaacagtagagagactttctctcctcacatttaatacttttgtgattcataattcttttgaaatatgggtcaatacagcaatggtttatggacctacatcattggtagcatcaacaatgtgttttgttagctcatagataattatttgtcttttcttggtgtactattgcatgactgcttgggcaagtttgtccagccagtctctggagacttaatcagggcaccttctccttgcagtgcaatataggaggttgagtctacctacctttttaatgcttttcacaaagtaggaaaagaaataaggcatcaaaattacatttaactgctacagtgatcccattgttagaagcagagtgacacatttgtgtctataatgtcataatctattgaatatcaataaattaaaaagaaatattgactctgttgcctggaagtttctaagaggttctgctatcccttgacagctggctgttagaaaacactggtctttttattcaagccttagttagcaatattaatgcccacatcacaaattacaccttacctagtaattattgttaccagggaaactggattccaatttttgggttctgagtctcattaatgaggggaattagaaatggactcagaaggaagctcatggaccatttgattagagtttgaatgaaaagaaataatacaggcaggctgaaaaatctcgatagccaccagagagaaggaaatggagagaaatccatgtttttaagtcaggtatgtcaaaggtctctgttgatggttcaagagggacacagagatggattatggagggaaaggcacttactagaagagttagtaataccactgaaagatagttatctaaatcagcactctgaggagagagttcctatctcttgccagaaacagatactgtatatggtttttgaggagaggattagattccttggttgtagttatctttttttttttttttttttttttttttttttttttttttttnnnnnnnnnnnnnnnnnnnnnnnnnnnnnnnnnnnnnnnnnnnnnnnnnnnnctcgaactcacatagatccacctgcctctgcctcccgagtgctgggattaaaggcatgcaccaccaacgcccggctggttgtagttatcttaatgaagaaggtggtttatcctaggaaactgcaggcaggaatttccaggcaggaatcagggagtggggctgggagaaggatatatggccaccaataccccctttgttgtaaattaacttacctagatgagacagtctagcacctgaaagtttgtcatctagaggattcatacaggaaaagaattgtatctgggacacataatagaaatagagacagtttattcaaaggggaaaagtgcttctgacaataggtgtggcctggtgaacttggggggaattttcaaagccctgagccagaagaaccattatcctttacagtacatttatttaacaccctccatttgtaccattatataacatgaactttgcttgagtgtgctctgtttattgtatgaagctctgatgaagaagactacaatgttttctaaacaaatggtatctttcatttgttactcttgatgggaaagcccccagtcactgatttcataactgatctataggaatctatgtatcatttgctagtattcagtcatctgtactgacagaatctatgtatcatttgttagtattcaggcccctgtactgacctgtccttggggttctgaaaggatatgccctcagcttcagccactaaaagcactacctgcgcatattcattatgttcctttttaaaaaggccctgcctacctcccatatttctctctttctttctctccctctctctgtctgttccccctctcccctctctcttaccctctctgaaacctctctcctctctctctctctctctctctgtctgtctctctctctctctctctgtctgtctctctctctctctctctgtctctctctccctctttcctttctcctctctcctactgctcctgtctccagaggccagtctcccaacaacatttcctccttttataatcttcctttccctaataaaaaacccttctgcttaaaccctgtcacatgaggtcttcttctccaatgccacttaaattacaacatcatttgtctatcatctttatttttatgtaaattactaaaacgttctacaagtattcagaatagttgaaggatttttaagggatactacttgagatagacagagacaggtattaataccttgatattcacttcagggaatggacaacaaactcagttggagtcctgatagaaatattaccagagacagaaccaagccatgggttatggcttgtgcctaacttcagaattgatttgaactgtagaagcaaagtgcaagacaatgtaggtcaaaaaatgaggttcagggccaagtaccaacaaatttaggaatgggtggatcatctggttatattatagtagctttgacagtactaagaactgagaagagctgaaggaatggtggtatggggaggtatgtttggtatataagataagaaaataaataaaactttttaaaagttgcaatccccatcaaaatcccaatacaattcttcactgaccttgaaagaacaattctcaaatttatatggagaaacaaaagatccaggatagccaaaacaaccctgtacaatagaggaacttctggaggcatcaccatccctgacttaaagctctattacagaggtatagtcctgaaaacagcttggtattgacacaaaaatagacaagtagaccaatggaatagagttgaaaaccctgatattaacccactcacctatgaacacctgatttttgacaaacaatccaaatatatgcgctggaacaaagagaacatcttcaacaaatggtgctggcataactggatgcaaatatgtagaaaactacagacagacccaagcctttctccctgtacaaaacttaagtcaaaatggatcaaagacctcaccataaacccagccaccctgaaactattagaagataaaataggaaatacccttgaattaattggtacaggagactgtttcctgaacattataccagtagcacagacactgaggtcaacaattgataaatgggacctcctgaaaccgagaattagacaattctcaatagaggaatctaaaatggctgaaagacacataagaaagtgttcaacatccttagccatcagggaaatgcaaatcaaaacaactctgagataccatcttacttctgtcagaatggttaaaatcaatgacagtttatgcttcagaggatgtggagaaagcagaatgcttctccactgctggtgggagtgccaacttattcagccacttaggaaataagtatggtgactcctcaagaaaatgggaatcagtctaccacaaaatccagcaattccactcttaggcatatacccaaaagaagcaaattcttacaacaaagacatctgttcaatgatgttcatagcagcactatttgtaatagccagaaactggaaggagactagatacccctcaaccaaagaatggatagagaaaatgtggtatatttatacaatggagtactactcagcaggggaaaaaaaaaaagaaaaacaagggaatcttgaaatttgcaggaaaatggatggaactcgatgaaaccattctgagtgaggttatccaatcacaaaaagacaaacatgatatttactcactcatatgtggattttagacatagagtaagggattaccatcctacaatccacactgccagagaaactggtaaacaaggaggaccctaaaagtgacaaactttgtcccctggagaacgggaaagggtcactatcccctgaacaaattgagaacatgggaaaaggggagagggagctacgagaatgggaagggaagaaaatgaaggatgcagagatcatgagggagcagaaagtttgagtcaggtgtagattagaagaaaggatatgtgataggtagggttttagttgtggggggtggtaggggaggaagggagggagaatggaactgggattgtcatgtaattcaatcttgcctgtaattcaaattaaaaaaaagaaaaaagtttaaacttatgctgcagagctttcattaaaaaacaacactgttttttcaatcatgctgtgaaatcattactgttttgctcactgccatgtttttgttatacaaagccaaattacatacctgggaaagaaatacattaaatggaaatctaggactaattatctatcaccttcgtcagtagaaatttaagatgaaaattccatcctcctgggagctattacactgtataatataaccagctctgacttattatcaggcagacatcattttaaattttaagtgttcatatagaatacttggagtctaggtgctattgtgttggcattttataatctttcaaaagaaataactgtctgtatgtatatgcatgttccataaatgtgggacttctcagtatactcttaatggttagtgtaagtctgattctgcatggcagttactcctaaatgtccctcataagagatcacacaaaactgcctctaccagtctccttcacactgtgtggcattatcaacactttgatagaccagagcaatttattcttaatgaggtcaatcagttagacaaacaatgctaagtgtataagaaggtcattgataaggtacagtgaacagtagccaggaggattactagaaagaatatattgtgccctttgttttattttatttttacatgctcaggttcagaggtctccctctggatgaacagtaatccgaaaaagcaggaaggcaggcttaattattatatttagataaaggcttgtttcaactatatcataataatgatgtgattaactcatatttgtccactaggatggctgaatgtctgtttgcttaactctgtgtttatttctaactccttaaataatacaataatgctattaagtagaggggaactacttcgttgtcttcagaaaaatcccacctgtgacctctggagttctttctgagggacatgtaagctcttaaacaggcctagcatatcctttctaggcaactcaacatctggtatatgctctataaatacgaaaatactcttaaaatattttattagccctttttgaatttttttacaatgagttttgaatatattcacccatttcttaccagattctcccccacttcttccacattcaattttgtgtcatgtttggttttaaacccatctggtgtaattttgctgcccacatatttttggatctgtggtcttccaccggatcattgttgtcttaatagaggctatccttttagagaaaactgtctctttttatcctatcaactagcaattgccaatagatccttgggtatgggtgggattctatgaccaactccctttttgggatatagtctggcttgagcttgcacgggtcttactcattctgtcacaattgttgtgaggtcctctgtgtagctgccctattgtgtccagaagatattattttcttattcactacctctggctcttgcagttttgctatgccctctttagcaatggtttgtaagcattctgaggaggttgatatgatatatacattcaatttagaatggagcattacgcagtcacttattctctgcctgttgaatagttgtagatctctgtgttgattatcctccaatgtaaatctaagcttctcagatgagggataggagatattttaacccatgggtgtagtgataagtcactagaactacagggcagctgaggtcagcaggaatttacccatgaattataacccaacttgcagagactgtaagccaaagccaaaacagaacagaaatcaaaaggagaaatgaattatgtgacataaaaaagaaatccttgcatatgttaaaagtaaaactgttatttgattatctattgactatttctagagggatttaatttgcccaataaagttttgatttcattcacaaaagtctttcccccttttcagagcgtaattttgaactgaaaaaacaaacaaataaacaaaaaaacctcatgtggagagttgggaaagccccaaatggccattgctatgtcagataaatcacaactactgttttgtaatttttactattaaaacatattaagaaatatggcctgtcattcctttggctggaacacatgattaagcagtgtagtgagcagaatgagcaggtgtcacagtagaatcagaaagaccatctgtcttcattttccatggaaacaatccttttgaggctttcagaaaggagaaacattgctatgttgtacaggaagtttaatgctttgtgggattttcttttctctccttttgaagactttctttgactattttatgcaaagtaaaagtgaacaatcacagcattgtttactcacagaatactttctgtctcattgttaaatgttcccaaacacaaatctggtgtaggtgaagccttatacttgagtatcctcaagttctatccatccattttgtcctaagtgataaaattagatcaagaaccatgaatgctggtgcatgtcgttgtccttaacatcagatgttatttccacaaaataactatcaggactattatttgaatgagaatcaggaatatataaattagtaaaatatataggaatatccccatcatttatcctctgtccttggaatgtcctcttgggaaggtccaaagtaaatatagcaatgtcaatttgttcttacctttttaaaaatattttttctaaaggggactctctctgaccacacacccccaaaaatgccagtctctccacccagctatttttgtaccatctgtacactttattccaatagaattattttaaatgtgtttgttcctgtgattgatctgtattgttagtagaaagattattttttttaattctgtctgttctttaccgaacaagattatataataggctttaatacagaaaaaaagctatgaatgattagatgaatggaagaagatgtggtatactttatacacaaattcacagataaaactttaagtaaataggatgtggcattaatgtaattatcagatgaatgtgatctttcagctttttctaattacatctgctaacaaagaattcattgtcatacacctaaatcatgaaaaatgagagagagtgaagaatgatatttagcacaattgctgctgcaagtgcaatcacagggctaaattcttgtctcatttttcaaatataatatagagaatttcagaactaaagaatagaaatgtagtccagatttggaatacacatcttatcccaaacaaagtaaaattccaaggatataatttcatttgttttttttccttcgtaatttatgtaggataatatgatgtgccttagatttagtaactcacatcaccaatgtgtttttaaaactacaatgaactttggtatactgacatgaagtatacttacaaagttcaaatggaagatggcatactcctatggacattttagaagtagtacagagggacagaataccccatttatgaatgtaaccaaattaaaataaagagcatatgcagattgctcacatagggtagagggtcattttctctaagatttattgcttaaggattgcagaggtttggttggtgagaaaagaattttgaaagttgacttaagtttgttgagtataaatttgttgtttatagctcatcataaacttttaggctttatgagaatcattgtctttaaagaacttgtaatttattacaaataaaaacattgcaagatacaaagtgtcctacatcacagggtaataggtaatgaaatgtgaagatctccagaaaatctctcagcagcccaagttgactatgcagacacggacaattaaaggtgtcatatttacttttctattgctgtaaagggacagcatggtgaaggaaagagtttattggagacttacactttcaaagggttatatcatgaccatcatggcaggatcatggcagcaggttggtaagtatggtgctgggacagtagctgagaacttacatttgatccacaagcacaaggcatcatgagctgactgatattagtcttctaaaactttccagatagtcccaacaactggggatcaaatattcaaatatgcaagcttatggggccatttgcatttaaaccatcacacagggcaacataaaatttttgtgatgtactctctcaacatgatggcttatcagtttttagcttcttttggtctgcttctcgttttctttggtccaattcaataagtttctgaatttgatctcctttcatcaggtttatagatgatttacacagctatttaattaaactttcctaagctatttgtttattaaattttattatttatttatttgtatatactcagagaccatagactatattgtgggaacattttccctgacattttctcaatgtgaagtgctataaattactaaatagtccctatgagagtgtaattctttagcatttttggatattgttctatttatttagaacacatctattgtcttagttatttttctgtttctgagtaaaataacttaagggaggcagggtttatttctggctcacagtccaaggtgtagtccattatggtgaggaagcctggtagacaggagctggtagggaccagatggagaggaatgtttgtgccagttccttttctccattttattcaattcaagatccccatttaggataccatcccagccctacttgctttcaattaatacagcattttgctcagcactcagaagacaaaggatgatgaatctctaatctcaaggccagtctggtctacagagtgagttctaggtcagccaaaagtagacagtgaaagaacccattaaaaagagaaaggtaatgaagttgtaattcaatgaggggccctgttacattcccagcaagcagcagaacttagcagatttagccacaaggtttaggctttagagtcaagaatggaagaaatgggttatggaatcaccctctgtgactaaggaaaactgctgaggccaggcatgtgtaaggggtgtccctgtatggaggcccagagaaaccattgtgtaaagctgtaaaggtggaacctggattgcctttgagatcccaagatgttagagatgccaaagtcatgggataccttccaaggaaagctgctatcagggagtaaaaccagcccaagagagagaagtgtgatgcagtcaatagaggtgaaagaagttggagatctagagaatactctgacatcagacatggagatgaagagtttggaaatttcccagctagttttgcttttgctatggtctgtatttcttcactgtgcccccttccctacattttggaactgtaatgtaaactcacggccattatatggtggaaatatgtgatctgccttttcattttaactttataggtgattacagttaagagattgaatattggagaagaaattttgaactttgaaattttaaacaatgttgagactattagagactatagagggacttttgaaattgaactaaatgtattctgcattatgatatagttataagcctatggaagccaaagagtgcaatatggtagtttgaaggaaaatgcccccatgtgcttctagtgactggcactaatagaattgtgaccctgttggagaaggtgtggaatttttggaggacaagtgtccctggagatgggtattgagatctcagatgtttaagccaggcttagtgtgtttctttctcttcctgctacctgtggatctagatgtagaactctcagttccttatgaagcaccatgtctgtctgtacactgctctgattcctaccgtaacaataatggactaactctctaaaatggaagccaaacccaattaaatgttttcctttataaaaatatacagcattttatcattcattagcctgatcaagtccatctgtcacaatgtctcagaaacagagattaatttacgtaatccctgacaggtgtgcctgaagtcttctctcatggttgattctctaatctgtcaggtggataattaacactaatcaccaacactacagcttgtatcctctaatgaaatttacagtacaactcgtgtcctttaattaaatcaacaatctattccttcaaactagaaatatttagttaaccaaacaaccctacttttgagaaaatgtatgtgtccctctttccatgtctacttttaaggaactacacaaatattctgaatatagaaatatataaatataagaataaattgacagttaaaacacagagctatttccaaataaaggaaaaattataggtgaaaggcaataaatagactatgttgcttaggagctgtactcatgcagagaccctttactgtgtctgaaggacacatctgagcataatttatctgcatagagatcattaacacattaaagccatcaatgatatgcccaaaatctcttttccaaatacaggtgtttgtcacatattcttaccacaaatcagactttagatattagtagttcaatatatggaatctacataaatgtgtatagcttaaattgagttaacaatggatagactcactaaatcccctagaaaattagaacatctgttactataataccaagtctatcaaatgcaaatttagtgggttagtgagaatagatgcacatagagtatacccaagttgatcaaaattgattagtaaattaaagcttgatgtgtctagatctttaatattaaaaagacacttggggcatgttctccacatactaatttctcagagtacataaaatgcaacttgaaaatactagcaggagggcagaaataacttcaaagggagattgattctaattctgctggcacagtttactttccaggaggaaaaccattttccatgaaacacacattcatgtaaaactcccaaaattaaaaaaaaaaaactgctaaaaattggggtgcatcatgttaacccccaaagattcaataaataagttaaataaaagaaagaaaaaagatctgactattagaaagcctataaggtattttcttaattagtgattgatcgggggagggaccagcccattatgggtgagaacttccctgggatggtggtcctgggatctataagaaaacaggttgagcaagtctggatcaagccagtaaccagcatcccttcatggcttctaaatcagctcctgcctccagatgcctacctgacttttttatatgatgaccagttttgctaaagtgtaagaaaaatcctgccccccacccccaggaaaaaaacgttaaaaattccaggctcatctttacaaaaacaaacaaacaaacaaacacaaacactaaatattcagcatgcaattcaaagaaagtctaaagaaaatatccaacatatgatgttggatgatacaacagacatagaatgtttccagtgttggtggttttgttttgttttagggataaatttcataactgtagcccacagcaggtagggtcacactgttgccctcccatctgcatacttctaaattgctattattcttaaatccctaagaaaccactttatgaactccatgtaagtttcaaagacactataaccagaaaagctgtaagttttcttcctttaaacatcgacactactatttacagaactcacacctacattggtaggaaaaaaatattatagctatatgcctaaattaactttattttctttttctcttcttaattgtcatcactgaaaggttcatgtctgtctcagcaatctctcttttcttctttttaaacaaaacaataacaatcactaaatgtggtgactgtcttgaggacttcctgttcttactttcttattgaccacaactgcattctccttctttgtcgtttctgcacctttcttgacaccacctggctcatattcctcactcaaagtaattactctaggctgagttctggtccttttagctctgaaacatatccttacctttatataccttatatccctactatacagattgcttgaatttctgtctgcacatagaaatcaagcattttatatccctctgatggctatgcttgcttgtcagtttaactgtatctgaaatgaaccaccattcagaaacggatcttatttggatcttgaggtagggagacacatgcctttaatttgaaccacactttctgctggaagcctatataaggacattatagaaggaaagatttgctttttgcatgcttgacgtcaccttgctagtatatctattcttcacgagaattaaagcctacttcttggggattccagcaagtacagaagaccagctgagaaacctagcatcctgggactttattttcacaactagactttattagattagttggactgcagcctgttaagccattcaaataaaatcccattatgtatgtatggaaccctgactaatatgattctcttgaagttctcttagaagatgggcacacacaaatcaatgtgttcactaataaagctattatcacatattaatatctgacttggttaagtttatagaatgtagtattggaatgagtatttaggcagtggaagaactctttcttaataagtgaaagactgagagtttggctccaaaactcaaaaagaaggtaagcaaataaacaaaaaccataactgatgatataaaatttaatacttttcaattaagtttcgaatacctttcaaataagaatgatactttggacaggtaaggaagaattgaatgtagttagtggccactgagggaggagtcattcctctttcataatctgaatactggtaggtttctcatatccaaatgaatgttgacacctgcatgcatacagatactagtaattggacgcagggcttttttttttttttaacaacaatgaaaaaagaaaccattaacctgggagaatgaaggcgtatatagcagtagcaagagtttagggaagatagtggcagctgagtatcgtcaatacacaaataaaagttttattatttctaataataaagcaatattatatgaaaaagacaaagctgggcagtggtggcacatgcctttaatcccagcactcaggaggcagagttaggtggatctctttgagttcgaggccagcctggtctacagagtgaatgccagaataggctccaaagctacacagagaaaccctgtgtcgaaaaagcaataaataaatagataaataaataaataaataaataaataaataaaatccaataggaaacagagatgtcatcatatttaacaatggtttttcaaatttaattgtaattgcttggcagcaatatataattttttcaatcataacaaacaaactagaattaagaaaggcattcctagctctttgtttctcctttcccctaggacccaacaatatcttcaaaatgactttaagattagacatttcagtatggaaacctaggagccaactttgcacaccagattctaacacatagaagatataagcaaaagagactataacttcaatgactcactcaacttaactgcccacctgtactcttattcccactgaaggccccagtttaagaacttacttttaaaatgagaaatgaaagaaattaagggtatctttgcaaaattcagggtttggtccttttgttaaatagtcctactataagcctattacatttagcatgaacatatagaaaattaatgaccatagaacacagttataatagagatgaactcattattcacagttcaatatggaaattttttctaatgttgtgcttgttagacgtttaggaggtcatcatagagacagggtggtctttatctgttggtctacattgggggcaagtgacagtggtaattcaaatgtatgactagacgatttgcttgccatgggagtatcacctgctcctgagattccagactactgtcccatcccttggggctgcagaaaaaccagagtctactacttggatgcgccctccactttatgttgagctaaacgaatttgaaacagagcagatacaataaattcagtcaaaaacaccttgccttgggaaacagatataaaaatttcccattaaaaaggaggccctatctatagcagaagaaatccaatacccatggaggtatataggacagaacattctatacaaccaaaacctggttaaaatcactcttccttttgcacctcaatatgctttattttcataattaccttctttcattcaacacattacaaatacattttacatttttctatttctgattattgcttttctcatgagggttcccatataatgtaaaactcacatgaaatttttgtgattttgccctattaatctagtaataccaatttaattcttagacacatttggggaccttagcagataagagatgaaggtgtgcattaatatactaactcctcacaaagcctcaacttcttttagttaggaatgttctataaaacagaaatgaaaacaaggacataggatattaatatgaatttttaaagagttcttactattcagtgaaggccaatattccatattgagatcattttactgagagacagaaatagcaggaaatctaccaattccctaagataccatgatgtggataaaattattttcatggatatcagcctgtctttttttctgtagactggatctgaaggattaaaatcctcaaagacagtgatcactaacatatttgatattttaaagtttcattattatgtcacaaaaagcaaagatatttcgttattttcatctttatttgttttggttcaaaaatgtttttatctttctcatctttccacagatagggtatatatacctacagacaaaacatggtactgttttctacattgagagagtactatgtgcctcattcacagattctcctgtgcccctggacacctaatattgaggtttccttattcatttctaaccaccagaggagaatattcaaaacatgtaaaggccattgtttcaattaacaatagttaatatagacttctgtctagagtgttagaatatgttttttttatatacccagtgaatcactggatgctcaccaattgtctgccttttttgttttatactgtagagtatggttgacatagggtctctctgtgtatccctctctatcctggagtttgccgtgtagaccaggctagtctccaactcacagtgaactgcctgcctctacttcctatttgttaggactaaagtatgtagcaccatgctcagctaattttatgtcttttcaaattaattatacaagacatagagcttagaaacaacaatgtgctacctaatggtggatacattccaaaaactatgatattgcacagtttcttcatgagcatgacagaatgtacttgtattgctcaaatatatagtggtgcctacaataaaaacaagatgaaatatgtcatgactcaataaaattattttttctaattagtagatatatactctaatgtaatgaaaaaatattattttgtaaacacataagtctgttggattgatattgaatatttttatcagctaccaggcataaagtatgattgtttatgacacagttttacatagttacttttatggtaggcttgcccataccagcaccattagacgctgatatagtaagtttgttttacgataagctttctcataccagcaatactatacataggtatagttagttggttttatggtaggtttactcatatcaacaataccacacaggtagagttggtttattttagaactgttcatgccagcaacaccacacacaggttatcatactgcagtgttagatgctatgattttatagtgtttataacctcattaaaaacataaaaatttcagctccactattatcctttggattagcactgcatacactgtaagctgtttaccaaactcctgagttaggtaggtagtatatgaccctacatcaatgtgggcttcagaacaaatgataggctacatgtactcaaggttattctgtgtcaggaaacactaaagcaaaaagtatgagaacactataccctgctgcatcatggatggaccaaagatgacttatggaagaacttctatgggtacatcatgtatttcctccagctgtgctcttggaagcatttcttagttgatgaaatctctaccctgttaggttacactcttgacttctgctaaaattcttttttttttcctgagaagaaacttactgagccaaaacaaactctaaatgtcatatctgccaattagcactgtgacctttctgaagtcactctccctttcctggtttgagctttgtttttctacagcctcaaacatttgctacagcctggtagcttctttatgttgattcaaactgagaaatttaacttttagcattaagctggaaaggttgaagttttagttctttatgaaatttttattataagcatttcatttttcctccagtcactaaatttatgctaatactgacaagatgggaatctatatgatgtctgcaactacaaggagctaaaaggattttgagctacatgcttctgtggaccagcattacaaactctgccagatggcagtgaatttgtcatgggtcatgctatgggttcatgattgtacctaggcacaggcacaagaagaatccagtggcaaccacaggtaattcatttcagtgattgggtcctggaaccaactaaaatgatcttgctagattatttaaacatatgtagaatcttagtggtaggtttgaatattcatagcaattatctagttaatataatcttgaaagggggaagaataactgtatgcacctagctggaaaattattttaattaatgaaatagggcctatcaaatttatcaaaattctcaatccttgtaaactcattaataaaatattctaaacaagattagctcaagactctggcattgcacctgaaatgagctggatagtgacagagggtgtccccatttctgaattctaactgaagttctaaagtggctactttagcttcatattataagggaagttatggataaatggagttctcattgctcactttattctcagttaattcaggcagaaggtctttttcataattttctacccctgttgatagacaccctttaattacagcaacaaccatgaagtatcctggttgtttataccttctagacaatgaacaaattgatgttcaggagagcgtcttctttctttctccttcacttccaattcctcttcccagatctgctgtattcatgctgagagaaatgtcacttgaactttaaaacacaggaagcaattgaggctttaaaatgataactacaaatgatcccatttttgacaaatttgtcagacacttttggtagcagtgaaagtttgtagttattgcatttctctgaaacacttaagtgtcacctgagatatttcacctaagcaaccctgctttcacatttgtctgtccttagtgaacaacttctctcacaagagtgtgcatcctttttcaagcaactacctgctatcccagttatacgttttcagcattaaaagggtcctgatcctaccggacatgactctttcctgaccattcctttcctgctacacaaataaccatgcaaactgatttttccctcctctgggccatcagttgcatatcttatttctgctgattattttgcttattgcctcagtagaattcaaatgatgccaaaccaggctttccattcttctaactacaagtgggttagaatttaatgttctatgtgatattaaggtattaatacatatttcagttttaatatgattaaaaactaatgctgacaattactttaagcttagataagaaatttactttcctacattacatcaaataaaacttgaaaaataccgagaaatgctactttaggggactagatattgagagatttaaccaaaagaagaaggtctaaaggagttgagtttctgtagcttcatcctgtcccaaatgagccaatcctgtgcttttgaccagaatagcattaaactaccaccatctctgtacattttgcatgtacaaaccagcatcttcagttttgatactcaaattctagacaattaggcataccaaattcacttattatttttctcacatattttatgcacttgggaaaatctcatttagaaatattctctgaatatactgggggaaaatctatgtatgtatatatctacttatctatatatcatttagcatctgtctatttaccatatatcatataactagcaatttatctaacatctagttgtcatttatctgtttatacgtatatacagacatgtatgtcaaacaatatacataattaagtaagggacaagatggtggaatgttgaaaaacacaagagaatttaaattctggctccatggatcattttgcaaggtcagatacctcatctttgcctttacttttcatattaatgatacagagataatggaacctaaacgtagggcaaacagttttagagtgttaaatttcataaagtttgtaaaatttaatgttcaagtacaataatttttttctgaactactttaaagtaaatacgtttagtaatgtaagcttgaaagtgaatgtgagcctggttacaccatatcctcatgtctgggactgcgtgccttttgttgttcactctaacatgtttatgaattatgctacactaacaataaattataactataacattagttataaaactgttctcctgatggaccatttcttttctttgatgtggcaaccttccttatattttcaattttgctttgaaggctgcttggtaatatataaggacagctattcttgtcaggatctttcttctacttgcttggcatagattgtgttagtcttcaaattcattctcactctttccagagagttgtgtctctgcaaataccgagttgtatgttttttgtatcacattaaatgaagtaacatgtgagcaccagtcccatagtttggggctattgaaatttgtattattcctcagagattttttttttactggttcctttcattttgtttttgttgttttattggtttgtttaaatgctgtttgtttgtttgtttgtttctgtctattctatcttatatttgatgatttattgagttgggtatttttagtctgtgtttagtttagcttattgttctatgcttttcaggaaattatatttcctatgtctttatgttgcacccatttctgttcctcttctgagtgtaggttttctgctgtgctcttgagaacttacttggtaatgaatttcctaacattttgcttctcttgtactgtctttgtttgtccatcagttacaggtgtttgtcttatgtgtaataatattgtccagtgttttttatactttcagaaataagcttttccatgtttatatgtaattggaatattctttggatgatcaaccagatcccaaataaagactccatgaattattattaattgtgaatgcttaatagagcttaggcttggcccaccagggcttttaacttaatttaacctgttgctattttatttacattttttcaagagaaaatttacatttttctttcttcaaaggattctatacattaattaagtttagagagtatgatattagagaaatgcctaactgctttgtgtacaaattatacacacagtagcatgagtgactattaagcattttcttttttttcttttttcccaactttttttattaattagaaacaggattgttttacatgacaatcccagttactttctcccacctgtcctccctttatttacatttttcctccagtctgtttacctttctttcattctgtgtgttctactttcctgctttctctatgtctggctggatgccccctagagtctccctgttgtttgattttcttttttcctcaattctaaattccccactttgcttattttccctgcctggaaattctgattgtgcctcctccctcactattagccattcaactttttattagaccaatcaggtgccttagacaggcaaggtaaaacagcaacacatgtttacatgattaaacaaatgcaccttgtctttacatagttaaacaaatgcaacacatcttcacatagttacacaaatgcaacacaactttgcataattaaacaaatactctgcaacatttcgacattttgtttgaataaaaagacagttatagctttaacatagtaagattatatacaataaagtaattatcaagcaagaattgcatttaaaatatccagcccacttgtatttggcaaattcagagaaactatgctattatctatcctatcttgtgaatccaaagttttgtacctaatccactttctattctaacttgtattaccaaccaaaatttatattctcaaaactctaaacattatcttagataaacatattatgccccttatatcagtttagggcatttcttttctgaatttgttaacaaggaaaactgtaagattaactatttcatcttcaactctaccagagacctgagaatgttatactattacctgagctaagagaatagtgcagggcaagcaacttccaaaatcatagaaatgacaaaagcagctgtctgactggatagtcattggagtttcatgtgaccttcagatgaaagggcatctttctttgatttacaggcttagaatatctgacagactttttgtgaaacatgaattttgaatgactgtcccaccttttctttgcaaagttaggcatgtattttcctttgtatactgattgtccactttgtacaatgtgctgtcagcagtcaaggcaagggaagtttcttgcctaaatgtctaactttgccacaatgaaaggtccatacgtggaggttcttcagcacccataatctttctatggagtaaattattgctgccagaagtagatgtgtctcactgtcatgaaagccttaggtttgggtcgggatcaatgattagttgtgggtgtcagcttctacttccaccagctgctggatgaggactatcaggtggcatataagtcagtcatggctttcagtgaggaaaccttgaaaatctacagtacctcctttagtagttcagtacttatccctagcataggtgaggacttagggagcccattcaacatagagggatactccctgagctaagacacacaggggtgggcctaggccctatcccaaaggacatgatgactctgatgacaccctgtggaagacctcaccatccagggggagcagaaaggatatgtggtaggtagggttttatttgggggtggtggtagggcaggatgggagggagaagggaactgggattgtcatgtaaaacaatcttgtttctaattcaaataaaaagaaatctgcaaaaaaaaacccaaaaagccttaggttattaacgatcataaatgcaacattctttaaatatctgaagcatttaaagatatcctatcagtttctggctattacaaataatgctgctatgaacatggttgaacagatgtccttgttatatgagtgtgcatcatttgggtatatgcctaagagtggaattgctgatctagtggtagatagattcccattttcctgaggaactgccatactgatttccaaagaggctacatgagttggtactactaccaacagtggaggagtattcccctttctccacatcctctccagcataaactgtggttggtgtttttttttttttttattttagccattctgacaggtgtaagatagtatctcagagttgttttgatttgtatttccctgatgctaaggatgttgaccactttcttgtgtttctttcagccattttatattcttctattgagaattatatatttatttctgtaccccactttttaattggattagttggtgttatacaaactagcatcttgagttctttgtaaattttggagatcagccctctgtcagatatgggttgttgaataccttttcccattctgtgggataccattttgtcttactaaccccagactgatagctggaaaatcagcatagcactgttccagaccccctgaatgtagaagtcagtttgaatgtctagacaatctatgcggccactggtagtggatcagtatttatccgtaaaacatgaatggactttgggagcctactccacatagagggatgctctcttagcctagacacatgggggaagggcctaggccctgatccaaatgatatgacagactttgaaaagtcccccatggaaggcctcacccactcagaggagcagaaaggggatggtgggatacagggttggtgggggcaggggaggaggaaatggagagggaactgggattgatatgtaaaagaagcttgtttctaacataaaaaagaagatatcctatctatctaaaatatatctgtttaatgtttaaaacatacctgaatccattttttattgttatcaatgaataattactaacctgcattatttaattatactaaacacattacaatattagattttaaggactagaatgtggtgatatattatttatgattcattaaatcttgcctgagatttcagaaagcaaagtcaaccacaaatcatagaagcctgacacacacctttaatcccaggactaaggattaagaggatctctgagtttaaagaacaccattggctaccagagagtgaatcagtgctcacacctttaattccaaggtttgagaggtataaaagttagaggcattcattctccagccacactaaagataggaagacatagagtcttgggattttccagccatggagaggagagcatagcaatttgagattttggtggagccgggatcacctttcagccttaggtagagagagggatgagctagtggccagctgattttcttttctgatcttcatcttgaagcttgaaccccacatcagtctctgtatcttttatttattatgttacactacaattttgtattatatttttaagtgagctgcatagttataataccttaaatagagtagaaacatatgaatggtataacaaaataaccataaatttgtatcaatatacaaaaattcatacgaatgtaaattatttgggatgaatagttgtcattttattctatattcctatatctggactaaataatgacaaacatccatagcctgttaaattaccaaatacacccacctcaactcttgggaatgtgggcattgtgttctctagactgcttccagttgtcttggagaaacaacatcctcaggggaccatgagaaaattgagataatggttaagtcttaagaaaactagttataacattttttgtctggtccctgtgtaatgggtcttttttgaagtccttgcttggatagtctgtgaggctagatcatatcagccagcggccttgaatatgttctgaatgcagaactctgagaaaactgtaatagaggtactctgaaaggctggatcacctgaatgatctgttttcattgttatgttgttctgttgtactgaaaatacacatatcttaaaacaaatactctgcaacaattgcctgcttttgaagaaggtgtgtccaatttactttggaatataaatctctttatatggatgtccacagctagctttaaatttttgaaatattgtgttataatttcactgaacagtattcttatccctttcctgcttcaaatttcattggttggaggtgtggtcttatgtttagactttaaagcacatcgctgaattcttgtaggttgtaatcatgtgttattatatttttatactttacaaatatgtaatttcattaacattgttatattaatctgtgatattttttctgtgtctgcacttcaggtgtggtttcaggtgtccttgtcattttcagtatcacagttgtttgattcatcggctaatagcttgatagtgagttaatgagaggggcctataagtttagaactacaaaaatataaaatattctctttccctagtagaacaatttgaaagtagaatttctaccaggaaaatgacatgttcatatactttcatatattatacttcaaactttaaaatgaaaaaactgtaccaaatgttaaagaacaaaaacattctaaagtaataacatatttggaagatagtatgacaaaatgttgtgtattcaattatatagaacaaatataatcctgagtgtaagggggaaatgacctttatgctaacatctgttttacagaagaaaaaaaatactcctgcagattcttgtatattttagactattataaatttgtaaatattgacaatattgcaattaaagtatgtgcatcaagaacaaactatacatgtcccatgtctcacacttagtggataagtcaagatactgaggtagttttctgagtggttgatcaagtctcatccatccaaacttccccttctttccaatgataattgtctacttttgaacactagagagaaatttattataataaacacacatattcaattttatcttcagtattttcatttgatgtcttaaactcaaagagaaagaaaacatactttgtttaaaaatagaaacgaggaaatgtggtatttaaatttctcaagatggtatctgaaaagacagaacatttcttgtaaagaataatttctaaccccaaactgttgacttttgtacaagtttcagaggataattatagggaaagatttgttcccaatacaaaactggtggtggtgagagaaacctagtgtctactttgatctgaagcaccacactgtaccttaaatactgcaaggctgaaaccaaaacaaaatgttgcttataaatttcagtaatttcccacaggtgtagcatgattttatcttaagttgaaggatgttacatattctgatccaatgagttgaacaagactaaagaaaatggtgctataaagacacatgttgactggtctaagttctacagaggacaatatacattttagaatgcagtttgaggcaattttttaaaatccagaactaattttatactgtgaggtgaaccattcagttaagatatcttcaaaagggtcaaagattcaagatgagtacaaaaaacacaatcacagatcagtaaatgtaggatgcaaacatctttaaaataataagcaactaatctaattttaagtggaaaaaataatagaagactttacattaatgattaaaagctaggattatataaatatatcagtttaacaactaatattggatgcttataaagagcaaagcttctttccaggagaattacaatagggctgttctggactaaatagttgtttttcctccatttttaaatttaaaatagaaacaagattgttttacatgtcaattccagtttcctctccccgcctcccctacccccactaacatcctgcctatcccataccattcctgctccccagggagagtgaggtcttccatgggagggggggtcttcagagtctgtcatatcctttgggatagggtctaggccctcccttgtgtctaggctgagggagtattcctccatgtgaaatgtgctcccaaactccattctgctagggataagtactgatctactacaagaagccccatagatttccaaggcctcctcaatgacacccacattcatggggtctggatcaatcccctgctgctttcccagctataagtctggggtccaagatcatctacttgttcaggtcagctgtttctgtgggtttcacaagccttgtcttctccactttgctcattactcttccttctctgcaactggattcctgttcacttctgtgttaagctgtgggtatctgctaaaggctctaggatggcatataattcagtcatcaagctcattctcatgggagagcaattaaggtagcctctccactgttgattagatggttagttggtgtcatcctcttagatttctggacatttccctattgcctgatttttctttaaacctatactggctccctatatgatggtattttgttctcctctattcttccccctacacaaacttcctgctcctttatatcttcctcactcttcctcttctccccttatcaagctcttagttccctctcccatccccacatgctcccaattatgtcaggagatcttgtccctttcctcttctctgggggaccatgtgtgtctctcttagattcctccttgttgcctaacttctgtagtagtgtggattgtagactggttatcctttgctctatttgaaaaatccatatatgcatgagtacataccatgtttgtcttttggtgattgggttacctcgctcagaatggtttcttctagtttcatcgatttgcctgcaaatttcaagatttcattttttttggctgagtagtattccattggaattaaacaaaattccatatttgttttccctcaggacaaagccttgaagatcttctttgctatatccctctaatgacatggatggagtaaagttctctgcctatcatccaggtttgaattgtaactgacttgacccagagaacatgacagaattgacactggacgaatttgggatcaaacaaccatgcaataattttgattgtcatgctccatgatatggtagtaaacctaaactataaggtgaacttacagagagtgagacaccatgataaagagggatcagagcaccaagagaagcaagccatatgagtcaatcaagcactgaggatgtagagcctcaatccagagtacaacagtggcaaagtcttgagccctgccagaggttttaaggtttctatgatgtaaaataaactcctgaataaagtaactgcattatcatcagatttctctagttgaatacaaggattagatgattgaatacaattctttccagtgagtgaatggtttgtagagagctgggtactatctgtatcacagagtacatgctaaattcttcctgaaaaaaaatcaactactttacagaagttggtatcagactgaatatataaatatgtcaagttccaggaacaaagatagccaaccgactctgtcttctatggagagaataaaaaatgataaataaaagaaaaataaataaatactaaggaggagatgtaaggcacatttataggaatattctcccggagtgtgaagtcatattcatacatatgtatatgtatgaatatatatgggcacatatacatttatacacatatatagacagtcatagagcaccaaagctttattaacttgaaatgaaaaactgactaaaaatatagttctgataaacttaaatccacttccttatgaaaatgtgatttttcttttttctttcctgttattgactaatgttatttgtgggggaatattttccattaatgtgttttaaaatgcaagagcacactggtataaaaaggtaactgtatacaaaagtttctttggaaatactattttccaagcacaactaatttttgctaagaccatgattggagccagatgtttcattggttgtagagaatgatatttgcccaatgccattttcggtttctgaaaaaaattaattaaaaattgattctctcttactggaaaacatgttcatgtatttggcagaacatttttagaatggtagattctaattgattttattctagtccacagtgaaggagcattttccctttagtccactagacagacaaaaaccttcaagcataaatggttctgctgtctctttccactctccacataactctcatagtaacagacaaatcctttaaagcttttagacagatactgagaggacaggagagtgctcagtggtaagtgtgcttgttgggtcaatagcctgctatccatagacaaagttcatggagatcaatggtgtgggtggcaaaaacaaggaaggttcctaaggtatgcaagccacctgcattgatacagagtcagtgagaaatgccattttaaaggaataaaatatattatgataatctaagaatctgttgtcctcctttggcctcttaattcacttgcacaggagtaaatactggagtacttatatgtatgtatatatcatgtatacatatacaacttatacaaataaaaggaaaagaaacatacaagaactataatgaaacaaaattaaataaaattattccatcaatgacataacaacagtggctagtacaatacattaaaaaattgttatttggcttagtcatatcactcttaaatgtaagaccatgttgaagttatagtaaaataacccataaaaactgatataaagctgatatcataaaagattaattgtaacttcaattattttatttctcatatatgtaatatgtgaaacaatatagatgtttagataaatgttatgctttgtaactaaattgctttaaaatgtataaattttgttttaaaacaaaaagatacttatttttttatgtgcatgtgtttgcaccatatacaatcctgttgactggagagaccagaaaagaaactgctgttgtgaaccaccatgtggacgcaggggcaggagaacagttctgtggtgatatactgcttattatttaataaagtcaaatgcaaagctacctacagtcatagagccaggcagtggtgacacacatttaatttcaggacttcagagacaaagacagaaggatttctgttagttcaaggtcacactgaactaactacatgaactcgatccattctaaaagagaaacatctcacacaaaggtgatccctgcacttggggtcacatccctttaatcccatcacatggaaggtagagacaggtggatctctgtgagtctaagaccatcctgggctacacgagagtgaatcagagctcacacctttaatcccaggatttgagaagtataaaatgaagaagccaacagttagttgcatgtgacatttactttccagacagggaaggcataggaatgtagtctaaggcttggtgggaagcagtgcagtcagcattgtgcttggaggattttcaaggacaggacagccctttcaatctgaggtagaggtaagagcaagtggccaacagggttgatttctgatcttcagcttgaagtttgaacccaaatatctgtttctgtgattttattatttgttttatataggtctctgcaaaaacagcaagtactcttcagtgatgagtcatctctccagcccacagtgaactttcaaaatattgaatattgtcaaatagttaattaggaaaagtggtatttttggctttgaggtctccatccatcctgtgatggtccttcatgtccctactctatggtgaccctttgtcttgatagtttctatccttgattttttcaatcaacaacgtgtggtcactttagtcatttgtataatgtctatcaacttccttttgaattagtgagttctttatttcaagacagagcaaaaattttgtaccatgtttattatgaatttactccttgttttcttttgtgcaggacatcccagtttgaagtttacatgactcaaagttgttcctctcatgtagtgcatattgcttttattcagatacagatatttatggcaatgatttaatataaatatcaagtaataatttctgtttattccaaaactagccataccttctcttacccttgttaccacaacaattttcttttctaaaatatgttttattgtctgagtgtgagtagggtgtgcccatttacctgcatatgctagtaataaaaacgagagtaggagtgattaatgaagttcttacaagctgacatggtttctaggacctgttgaatggcatactccactaccattctgcttgctcagaaatacatatcaatgacaagaagcacaagttgggtccacttgtttcacacctagaattacaatcaactctctctcacagctctaagtatcagactcactcactgctaccctgtcctgcagagatatttcagtcctgctagctagttactcattccattggcttctatttttgaatcagatgctgaaggatacaattatttctgctttaacgtatcatatatacctccaaatagtccttttacacatggaaattatattttaacactatgatcactccattgtgcttttatatgtttgtgaatttatacatttaattgctggtaaatttttcagccagacacagaatgaaatgagtctacattgtagtacttgagtaacatataaagcagtaatatatagggctttgaggttagggttgctttcattctttaaaaatgcatgattgacttaggttaggaatgttacctgtgtagaatcaaaatacacctgtaataagaagtcagtgcccttcggtttgtgtcacaatgaactcatgccctatgcttttattaactaaaaaaaaaaaaaaaaaaaaaaaaaaaaaaaaaaaaaaaaaactaaaatataagtacacatttctctttctttcctttccccccaaatctctcctcactcctgccaggaaagttgtgttatttaaactatgaagcaggaaaaactgattcttacttttgaacttacattgcttctatcttatagattgttattagggatgataatcatatgtatcatatatatatatatatatatgacttaactatacagtaagtgataaaccatatactatctatgcacattcctcaaggattttatgtgtctatttgttcatgtgaagtcatttaaatatataaattaattagtaatcatgtcatttatatccttagctatttccaggatgttgctatttttaggtttaggctaacaggaggcagaaaagtacaataaaataaatgtggacttataattccattatctcagattatatgagcagagatgtaagtttacattttaatgagtatttccatgttctgtccatctttcaactctgtcaactatatccaatgataaaaaatataaaatattgaaactttaggaacaatttaattgattccatgaatctattcctgtaacaatatttttggttctacctgagcaatttttttcttaaggtcccaccattaagatttatttctttagtttggtctaaataaacattttgtcttttttacaatagcttcttcagaacaagaagttttcatgcattcaagctatgatggacaatatccataccagactcaaaacagtttggggaagaaagaacacaggggaaactaattagaaacaatttgccaaaatatattaaccttttcatgacttctattataagggaaataaaatgtcctttcatcagctttttttttttaggattggtctattctccaaacattttaagataatttgcagcacaattagtagccaattgtaattgcagttcatgctatcattggagtgagtaacgatgaatgacatctttaaaaatcattctaggattttcatctttttcactgattcctccatcatgtcagttttaaatataaacttgattaatttacaatgagaaataagtgtagcaggcataactatgggactaattcaattgttttttttttttgctggtcagtgaataagcaattggataaaattgattagactattgcacaatcttttaagtcatatcaagcaataggccaggcttctcacactgggggtgttaaattcatcacatgatttctggtatgtctaaccaaccaaaaacatttttataactttatactaacagccaaagaaggaaagaaaactcaactagatacaagacatcattatgtagtatatatttccatttgttatattcacaaaaattggaagatactaggaatattgccaggaaagcaaagagaaaaggagacatgaggcttcatccatgcttttctctttataaggatgacagtcactaaacttcaaataagatttgcaaacaggagccaagtgtttagatagtaaccatgatccttatgtagctgtgcatctaattttgaagacattcttgtgcctggaaagtttactatataaatatatttgttgatgaaatttgtgcgtgatggattatgatgtggcaaacttcatatactgaaattcactgtacatagtcttttaaagtatgttctaaattaatgtgacatgcaagggatatcatcagataaaagagagacagagagcaagaggcagagagagaggggggagctatctgcttgagttaggaaccacaatgaaggattcatggactactgtgatttggatatgaagtgttcccttaagtggcttacaagttgaaggcttgttttccagggttattgagaggaaggccgcaagatgagaaagctatcttttagagttaatgctgaatacctaattaggaggcatcacctaaaggaaagaatgagtccaatagagatgtgacttcaaagagggtatctggtctccagatgcttcccctttcctctacttctattcctccttctttctttccctcacaccatcctctttacctattttctcttcgtccccatccttggccagtattcagttagacgcctctctgacagattatttcacagccatgatattctgattcacctttggactaatgaagtatatctgaaactttgctctaagataaacctcccttcctttaaagagattttggcagataccatgtctcagcaacgtaaagatgatgagctcactcacatttggattggcctatttattcacttaaaaccaatgtaactgcttagaaatattttatattttaaatattcttgttgagtgtttttaagggaaaccaaagtgagagcattctgttgtcccttacttaatcctggcccagctcttttgcacagaatagagactttccctgtgagatagacgctaaaatgcactggagagaaaacaatagaacatttctgcagtctgagaacctgcattcacaaagttgccactgctctgctgatttactttggcagactggaattagaattttgattgccctacgtccctctggatctttcttcagattctgtgaccttgtgtcatgtaggaatgtttgtgtgtgtgtgtgtgtgtgtgtgtgtgtgtgtgtgtgagcgtgctcatgcgtgcaagtgtgtgtgagcaagcatgttgtgtgtgtgtttatttgtgcatttggttcaatgatagagatctcaagatatgcaaagatgtcaaagcaataaaaatgcatatggatgttgttcggtctattcttagagttactgtacatgttcatgaggttgctggcttttccatcatgccttttttatttaaattctttaattactactcatatttacatatccatcccccccattccttcgccctcccatgttccccattaacctcccaacctattcgacaacttctccccagggatagtgaggccacagggttccttcacattctgtcatatcatttgggggagggcctaggccctccttggtgtatctgggcttcaatagtatctctccataaggaatgggctcccaaagtccatttgtgctctagggttaaggactggcttcactgttagaggtcccatagactgtcttggcctcctagatggcacccaaatctaacagctgatggaagtagaagcagatatccacagctaaacactgaactaaactggagtctagttgcagaggaggaatgatgagcaaaggagtccattcaaggctggtgtaacccatggaaacagctgacctgaacaagggagagttttgtccctagactgacagctgggaaaccagcatggaactgatccagaccccatgaatgtgggagtcagttcggaagccttgaaaatctatggggcctcttgtagtagatcagtacttatccctagcataggaatggactttggggtccatttcacatagaggaatactccctcatcatagacacatgggagagggcctaggccctattccaatggatatgatagatgctgaagacccccttatggaaggctgcaccatccctggagagcagaaagtttatgggataggtagtgtgttagctggggatgggggaggagtggagggagaaagaactgggattgacatgtaaaacaaacgtgtttcttattgaaataaaaaaattgagaaaaaacaaaaacaaaaaaaaaacaaattataaaacacattgtctttgtcactaggagagaagctttttctcttttcattgcctcacctaaaagcctctcactttctcctgaatttgaaaatgctagttaaacttgactgacaacttattgatttgaaaagtacctttgatattagtaaaataggagtttggttctgtcagtgaaggcaactcctaagggattccctaagaggagggggaagggatggttagtgctgtcacattgacagaaactagaatgatcttggagatggggttctaatcataccaatgggggttttattatgctaattagtacagaaagatccatcttaattgtgggtgttatcattccctgttcatccctagactgtattaaatagagaaatggagctttagagcattattcttctcttcctgcttcttcactatgggtacaatgtagtcaactccctcaagcttatgtgggctgctccctcaagctcctgctgctgtgccttccctagaaaaatggagaaaacttggaagtgtgagccaaaagtaatgaaaacaacaaaacacatgttcctctccctctcctttaagctactttcatgagagtaattattacacaatggggctataaactctaatggtgaacctgccctgaatgtggaccacatgatttcatgggttcagaggttgaattgaaactatgagcaaataactcccccattagttgtttccttggttatttcactgcagtgatgaaaggtctcagtaagtcatttacctgtatccctcaactatacagttcattttttatttgataaatatgaaaccaattcaaattatgtcatttttagacaggtttccttatttcaatccatagaatgtattgattttcccctttaaacttcaggactaataaagaaaacacagagaaccatgaagacactatagagtaaagggtgaaaatataactaatttttcaaaaaattttaagtatattaacaaaatcaaatatttttttactaattgacagatatttataaacattctgagtagaaaatatttgtaataaaagtttaatgctatgttaacttgatcaacaatacaggaacataattatcaaagagtgaaggggaagctgtagccacgcctacttaggggctggctacagatgtgcctgaccatgcttgcgagggcatggtcagggtgttgtagagtgactgccttttctcttttggtttcactttggtacttgatggacagaatgctgccacgctggctggctaggtcgctctgtaagtaaggcttttccctattaaatacccttgtatttctacctgactctgtattggtaatttcccagtataaaagagtaatgaaggaatcctttattctgtttccttttctttcttattctctccctccctcctttctctctctctccctctctctctttctctctctccttctttctttctttgtctcacacataaaagcacacactctatgtgtattttttatattatattctcattataaagataagagcattgctaagtaattcaattttcagataaatggggtcataattattaacatatacaggatatttttgtgctacttgagtataaagggtaatcagttctttaacagaataatgtcttgctttgtcttgatagtttggttcttcaagactgtttccatgttttgaaaagtctcttaggacctctagctccttgggctcatgaatatgaacttgttacctttctcattatttttgttgttttgggacagtctcatattgtaacccaagctgatatggaatttagcttacagcattgtaagcctcctactcttattaattgtctcccttgtgtagagagtatagctgtgtaccaccagatcctactgtttctccttcaagagacaaaggcctttttttccagttgacttctgagacattttctcatgagtacatagattcttgagaaatcttttattctataattaagtggacatttagtaaacatagcctcttaaggatccatggtaaaacctttgaagtgaagcaaggtgaatggctaatagaagttagttatactccaggcccagtataggaaaataagggcactttggggagaaagctggctgaaggacacttggactccaggattaaagacaggacatgatgattagtctatcaaatagactatgagtttgcctagaattctgtctcctttaaacatagactaccacagggaaatcgaatagctgaatctgaaaacattccaaagccacactaatgattagagtgaacacaggtgtcagacaactgtggcttccctgctgttgttttttgtgagactatgttctctgatgatagctgatcatgaagaacattcaactaacaagtccttgataacttgtgcatcctctaactgaaaattccattggccactctgtatgtttcaaatttgtctctgaatcttcagatttgctaatggcaattttcatatataacttaattcactttagtcttgtatctttagagaatccagactcacctctatccagtctttctccctgatggaattcaacatttatttaatacaaagccaacattctgaatcaattttttgggttgtatcctgccaccagtcttactttgccacttttcctaataattctgaaatattaggaaaatcccctggctaataaaacaatttccatattattgaaacaggaagaaaacaattggaatcatcaaatatgtttgtcaaaggcataaacaattgtattcttttcataggttatatggcagattttctgtaagcatttgaaacacacatacattctggagattccagcactttctagaccatttcctttcctcctctatggacataaacttgattggttagttgtccacttaccaactggaaaatttagtatgcaagttagaacaggccatcctgttctgcaacttcctttagaacagtgcttatttttcatcatacaattaaaaaccagatttagtgagctttcaacactaatggcaattcatggcactccatcaaatcacttctcatcattgtcctcccttgcgaattcaggcatgccatgggctttataatgtattttaattaaacatttcttctcaatatttaaaattacattttacacagtggagtttttattgttcagtttaccgacattactcagaatgtgcagtagtgaaaggagagctctctgtgtttacccatacctatgcttaacttctttcttctttagaatgttccaacttccctctcttttctttcttttttttaagaaaagtatccttattggttattttaagttagggctactagtgttaaattcataactgaatgctaaattggtaattgtgtggaagtttgggtttgttcttcatttcagaagaatatttacatgattgtttcctctcgggactgctaaataccatgatattttcttgttctatgagagttctaattagagatttcagtggttttctttgatttttctcctttacataatgtgatatttttctcaagctgtccctaacattatgtctttaattttaatttgtttcttaccttaaatctttacaaggattacacagaatttatctcaagtcatccaggctgtcttcaaaatcacaatgtggccaaggatgatcttgaaatcttgatccatctacctctactccttgggtgctggggttaaagatattcatcaccacagtcacataatgtggtataggattgaatacctggccttgtgttgtctaggtaggcactataccacctgagctacacacacacacacacacacacacacacacacacacacacaatgacaatcaaatgtaatgctttattgggtaattattgccctgttctacttttcaagttcattaattctatactttctttcagctctgagtctattctcttagcttttgatcttattttttcctcttcccaggttttgatcttttaaatttttgtatgattaatttccatatattgatcatagtgttcagtagtacataaaaggaatcttaggaaatatcaatatctgtctatataatcttagaagttcaccctaaaacatttaaattatgaattgttttattccttttttctcttcctttccacctcccccttctccttccatcattctccctcctttcttttcttccctccctccattactcctcccttcctccttctctcccttcttccttctttctttgaaattgcagaatagtttctgtaatgtacaaatcaaatagcttcctgaaatccaattcttaggttggtttatattcactcctattcattttagaacacaattcaattaacttacatcagtacccctgtataccaactttttagggtatagtttttgaacaaatgaatttacataaaatcccattgtctttaacatgagtatttttttatagagcattgtgtgcttcacatgtaatgatttttataatttagctgattctttctaagacatttggttaatgagtcccatatccagacacagtggtatgaagaaataataacttcttttacattatctggttatttttagagcacccaacatatttgaaaattgtagaaaaatgatcatgtattattcaatttcaggaatttaaattgtttcatgtttcataaccaattttcatatgcattttatgcttccaattaatttgattaggttaaatcaatttgcttagtatgcaaaacgaacagtttgggatttagttatgacattttatgtatgtgtgcttatgattgtgcactactctcagtgtttctacttcatctttccctagcctttcccagctcaactctctttgtttatcctacttcagaggttttctgcttgtttgttcttgttttgtttgtttgttttacaaaggccactactttgcttcaaaatgtcctggaattgtatggagacagggagccctcagaatctctgattagagaagggaatgatttctgttcatacgcagttgctgtcatgtcctgtatgtgttctgaagcctcaaccaacaccacttctttctggattcttgtcaccctgatggcccttttagtgaagactaacaattcagtcttatttcatcctcatcaaatccactgctgtagctgtttttcaactcagaaacactgtcacttcttaccagccatagatcatttctgagtggctcaatagtcattgatcttgtgttaatttttttgtgtttttattccagcttcaggggaagttagacacttcttggtaacattcaacctcataaaagcctgtgtgaattaaacaatcacatatgagatttttctcggtttaatcagatgctccacagcatctgaaatggggtataggcagaagataaaaaaaaatctttcttgtaaataatatctttgccagcaaatttgtttcattacatgaaaagttcaagattctactttctttaaggattccatagtgaatacaaaccacattttctttattaatccatatgttgtaggatatttagattgtttccatttcctacctattgtgagtaaaacactaatgagcaagaatctgtggagtagcatagtcacacctaaggacagatgcaaaggagtgatgtatctaggccatatggtagatttagtcttagctttctgggaattcttcacaatgatatccatagtctgctatctcagcaactgtgaatgacagttcccttgtaccaatatcccctccagcatttgttatgggttgttttgttgatcattgctattctgatggggaaagataaaaatctcaaagttgccaaaagtttgatttgcacttccttaatttctagggatggtgaacattttctaagatatttctaactactttctttctttatttacaaactctctattaaggtcctagagacatttttagaatggctcatttgtgtttctgaatctttgttttttgggttcttgtatagctgcatattaaacctctatcagatatagagctggctaagattctgtctcatgcttcttcaccctgtgggcagaaactttttagtttcttgaagtcccatgtatcagtttttgtccttaagtcttaggcaaatagagtcctattcaggaagttctttcctacacgtatgttgtgtatgttactgcccgtgatttctactaacagcattagtgtttcactgttgaagttcaagtctttaatacacttggagttaatttttaagcaaggtgatagatatgggtttaattccaatcttctacacatgaacatccaggtttctctgcaatgttttccgtcttatgttttcagcatctttgttaaatattaaacagttgaaattatgtgtgctaatgtttgggtcttcaattttcttccattggcctaactgtctgttgggttttgctgttttgttttctgagacagtaccattttttttattacagtgtccatatactgcattttaaaaattagaattgtgatcctgccagcactgtttgtttacttgtttgctttttgtctttgttcaggatgcttttggatatcgtttatgtatttttatttttctcgtttcacttgaatattagaatgtttatatctatttctaagaataatgagatgtgcattttgattgggattgcactgaatatgtaaaagaacatttgataaaaatggcccctctttatgttttaatgggtataattaacatcctatcattgaagttttccttccagaatatactgtagggctgggttagtggatatgtattgtttaagtctggttttctcatggaatatattgttttctccatctacagtgactgaaagctttgctgaatatagtagtctgggcttgcacatgtggtccattaatgttggtagaaaaagtacccaggatcttctggctttcacagtttccatagataatcacagtttaccagcagccaaaagaaaaaaagaggaggaaatccacacaaaatgccaccacaaccaccaatacaaagcaaaaaagaataaacactcaatgatcactaatatccctcaatattagcagtcttaacttacctaaaaaaagacacaggctaacagaatggtacgaagacagaatccatccttctgctgcatacaagaaacacacctcaatttcaaagcagtcagtacctcagagttaagggttagaaaagattttccaatcaaatggatccaagaaacacacaggtgtagcaatcctaatacctaacaaattagatttaaactaaaatcaatccaaagagatgaaggaagtgatctcacatttatcataggagaaatccatcaagctgaagtctcaattctgaacatctatgccccaaattcaaagcatccacattcacaaaagaaacattactaaaactcaaaacaaatattaaaccccacacacttttattggaatagttcaacatcccactctcaccattagacagaaacaccagacagaaacttaccaaagtaacaaaggaactaacataagttaaaaaccaattgggattaacagacttctatagaacattccatacaaacacaaaagaacataccttctcatccccacctgaaaccttctctaaaataaaccacaaactcggcaatatagcaaacctcaacaggtacaaaaaatttggaataaccccctgtatcttatcagaccaccatgctttaaaattagaatttatcaaaaacacaaattgcagaaaacctacaaactcatgtaaactgaacaatatgtaattgcaccattcctgggtcaaagaagaaaaaaaagacattaaacatttattagaattcaatgagaatgaagacacaacataccaaaagttatgggacactttgaaagcagtgctaagaggaaagttcatagcacaaagtgcccacatgaagaaaatggagggtagtcacactagagaattaacagcacaactgaaagctctagaacaaaaagaagcaactcaccctggaggagtagaagccaggatataatcaaattgaaggctgaaatcgataaaatagaaacaaaatacaaagaatcaatgaaacaaagagttgcttctatggaaaaaacaacaagatagacaaaccctaatagcttaatattttggtgaaagaaaattaaagcgctctttatctacttcaataaaagaagtagtcaatacttttgagggtggtagctcacaaatggaagtgccataaatgtcatgtactggaaatataatagtaaatatattcaaaattcaatagcttaaatcagaattacttttgtaaagataccatatcttcagagaggagaaaaaatactggatagcaggaatagttagaatcatcaccagaggaattattcctttgctttgctagaatattctaaatttgtctgagtatgcaacatttacatgcctttgctcactctatttaaggcaatatcatgaatttggatccacgtctttacatgcatatgtttacatacaggttgttagtaacagggatgtttcctagataatactttgtttgggtgatgtcttcatcactgttctattgctgtggagggctactatgatcaaggcaactgttataagagaaagcattaatttgaggctttgttattgttttggaggttgagttcattgtcatcatggcaaggagtatgctgacatgcagacaggtagtggagcagtagcctagagctacatcttgatccataggcagagagaaaaatgctgagcatggcatgggctctgggcacacatgctccatatcatccagaaagccacacctactaatctctttaatctgtttaaagagtaccattccctggtgaagcagcattcaaatattagaggctgtggggccattcttattcaaatcatcacaggtaatgaatgtatatttaaataaatatagggaacatgctgttcaagaataaagttatcagaattgcaggtgctttgtgtaatctttcttgtgaaataataaattaattcataatttgaagaatagacattccattcaatggaaaatcttgaatagagtaagagacatcactcattgtcagttagttagcaaacattaaagtatataataattaatttaatgttgattccttcacacttttactacaaaaaattaagtctttacctcagtgtggtaccctggaattttcatttataatagatatacttgatggtacttatagctaggtttgttattttatatttattcaacatttttcaaatttgatacttaagttttaattatcttatagcacttaaaagaaactgatgcaacatttactatttttacaccttctattattttgtcacttattactctgtgagctgtgggggaccaaaatatttccgatatggaatattttgagatccagccttgggttttactaaacaggaacaccagaaagctctggcccactattgtattgctaatgccagtaaggctactactgtttaccatggcctcagggtaatatgcctcctatttccatctctgtgggcctaagcatctaaataagcctgcacctgggtggaggtggtaggtgtgtgagtgactagggaggacaggtgtagttagggaccagtgactagaggagagaggagaacaaagagagaaatggttccctcatggtattggcaggatggttaagaaacagaagaaaagatggctactaacgaaatgactgtagttctacaacatggaactgagagctctctaaagatgacaagatgcctgtgtttggtccttatcgctgctggtttgctaggagtttccaggtccacacacccccactcaggctgaacctcatggattaaagctgagacatgctgggtcgacacttgtaagacccccggaagctcaggcctccaggatcttttctcaggactacagccaccccaatcaccatgcagaggcagaaacttgatgcaaacagcaagagtttttaatgaaaggtggatgtttgtacaaacaggccctctcagcatgcaggctagagagcagccccattcccccaggcacaggcatttttaaaggcaaaaccacaagcttagggagggggcctcgactctctctccctcgagtacgtgaccagagtccctttgtcttgaagggagggctgggaatcagatagcctcctgacccaccagttgtaaaacctgcagacctcaggatatgctaactaatcttgcctgagcaaatggtagctatctctttgtttcatagggacccttaattgttaattattgacacattggacaacctgtttccttcatgagcccttcagggagggtggccatctgggaattcttggtacccagttatctgatggccttgtaagggagtaattgctggcagctggtaaattccaggcacaaagtcatagtagtggcctgtttctgggtcatagtcagtttctggtttaggccgccctacattccctttggagattttccttatctgggctatatttctttgctaatttttaagtctttcacactgagcccaatttttctggagattaaaaaagggtgtttaaaaactagaataagggttggagggactgctcagcagttaaaagcatttgttgctcttgtgcatgttccaaaaacccccatttgactgtcaactacatgttgttgtggtcccaagagatcaaatatcattttttcgtctctgtagttaatatgtatgtatggtgcacaaatgtaagttcacacacacacacacacacacacacacacacacactaaataaataaatattttttacattaaatgaatcagtgaattgagaatgttttgtaattagcttagcatggtatttatgaaattttatttttaaatgaaattagagaattgtttatatacttttggaaatttgattggaattatgggtaatactcaggacgtaaagaaacttaggagttatctttgctcattactaattgaaataattttagaaaaaagatgtttcatgggggaggggagggagagttagaagaaagaaaaggggagaagaggagggaagaggacacaccgagggagcaagaagatatagtaaggggaagaatagaggagaacaagaaaagagataccataatagggcagccattataggtttaaagagaattctgccactagggaaaggtccagagatctacaaggttgaccccaactaacaatctaagcaatagttgacagtctacattaaatgcccttctctgataatgagattgatgtatgccatcctagagtcttcatccagtaactggtggaagcagaagcagaaacccagagctaaacactgagctgaactctagaatccaggtgcagagagcaaggagtgttgagcaaaggggtcaagaccaggtgggagaaaaccacagaaacagttgacctgaacaatgggttgctcatggaccccagactgatagctgggaaaccagcataggactattccagaccccctgaatgagaaggccactttgaatgtattgacaatctatgggactactggcagtggatcattatttatccctagtacacaaatggaggcctttgggagtcctttccacatagagggatactctatcagcctagacacattggggagggtctaggcactgctccaaatgatatgacagactttgaagatccctcacagaaggccttcctctccctggggagcagaaagtgattgggacaggaggtcagtgggggcaggggaagagaggagggagagggaactgagatttacatgtaaaagaagcttgtttctaatttaaataaaaaataggaaatccacaattagaaaaaaagatatttgtgtttattgtaaaatctacaagaaaaatctctttccatattaagtatgctatgcaagaaatgtatattgggtatatttatggtagatgtgggtgagtaaaatagttttgaaagacctcagaaagaggtactttcgtagaaggagacccgcacccaggaatcagtgaaaccacgaacttggatgcaaaaccgcaagaggctttaatagtggcgcgggtacccggggacttagcttctcttaggccaagccccgagcccaggaagaggggtccttatatagcaaaagcgcagtacagaagcgaaaagcatagttacagggattctattggacaatttaatgaggtgcaaagttatttcaaatcagcactttctcaaggtctagtagtcaggcgaaacggccttggctttacttatcttcttccgcgtccagatggctgaccttgggtcggagggagcgttcnnnnnnnnnnnnnnnnnnnnnnnnnnnnnnnnnnnnnnnnnnnnnnnnnnnnnnnnnnnnnnnnnnnnnnnnnnnnnnnnnnnnnnnnnnnnnnnnnnnnnnnnnnnnnnnnnnnnnnnnnccgttcgcagctcctggacaaagcagcaccactgctctgcctctcccagctcaagttccccttccaggcgctgcccgcactgcactctccagcccctggccgcatcctggccctgccctgctcagtccccgctgcgctgccctcggtcaactgctccggactcctaccctatcctgggcggcccttctgggtcagcagccgctgcgcacaaggacgatcagcggggttacttcgccccagaagccggggacctgggcggcccagggcgcgagcccgggtgatgtcccctgcccagcatgccgcagcgccccgttttctcctcggccaactctcctcccgcccccacccgatccccagcccatcctgcctgctccagagagaatacccagcaccggcacaggcggggaagacagagaggcagcgggcaggggacatgcagaagcattccgagcaggtctttcagtttaatctttcaatatgttatctaacatctatcaaacatctatcatttgatttttatctaactaacctaatatttgttctttcagcctacaaatgaccctagtttattcaaagaaaacatcaggtatttctcttccaaatttgaaagacatataatatgtataaggtatcaaaggaataattgtttcgggtaagcttttaatgttcattcttttttttttatttcttgtctgttgccaaaatgtgataggcagaaggtaaataaaactgcaccacttttgattatcaagaaaatataaaaattatataaaacctatgctttgagttgatgcatattcattttcaaccaaactgcatctaattttatgcaactttttgttttttaatttgattactgtctttattttactcattttttcatttaaattagaaacaagatttttttacatgtcaatcccagttccctctctctccacacctcccctacccgccactaacaccctacctatcacatatcctttctgctccccagggagagtgaggccttccatagggggtcttcagagtctgtcgtatcctttgggatagggcctaggccctcccctatgtttctaggctgatagagtttccctctatgtaaaatgggctcccaaagtccattcctatgctagggataagtactgatctactacaagaggccccataaatttttgaggcctccacactgacacccacattcatggggtctgaatcagttccatgctggtttcccagtgatcagtctgggggccaacagctccttgttgttcatgtcagctgtttctgtgggtttcaccagcctggttttgacccctttgctcatcactcctccttctctgcaactagattccagttcagatcagtgtttagctgtggctgtctgcttctacttccatcagcggttggatgaaggctctaggatggcatataaattactcatcaatctcattatcagggaatggcatttaagatagccactccactctttcttagattgttagttggtgtcatccttgtagatctctggacctttccctagtgcctgatttcactttaaacctatcctggctccctctctaatcgtatctcttaatttgctctcctctattcttccccctacacaaacttcctgctcccttttgtcctcctcactcctcctctgctcctcttttcattctcctagctccttatcccctccccctatactcccaatttgctcaggagatcttgtctctttccccttcgacaggggaccatgtcctccttgttgcctaaattctatagttgtgtggattataacctggtaatcctttgctctatatgcaaaatccatatgtgagtgagtgcataccatgtttgtctttttgtgacttagttaccgcgctcattatttagcctacaatatattattagccaaaacatttctaaattgaaattattaagcaataatccacataaaataatcaagaatccacagtgggaaaatgtagacatgtagatcattttggtagaaacctagctaaaattttctatgtaaattctgtctcatgctaatgtgtatgcaaagaatcacagtagctaatatgcatattcatattaaattacttggtcttagcatttgagaaaacacaacttattttcatagtctcttctctattatcctaatgtttgtgttaagctctgttggttattatccaaccattttagtggaatccattattttccagaattacaataccctcattgttggctaaaagtgattaattactggttgtataattacattataatgaaacacaaagaaggtttgaaataaaatgcttggttttgtttcctttctcctgtttattttggaattaaccttggagttttattaactattattaaaacaagttcaatattaacacaaaataacatatttaaaatgtcagcatggattaatgccaagcaactatagatatctaactttagaattttaaatggtacaacaaaatggtttgcttattaagtaggtcctgggattataaaaggaaatacataataaacatgaaactggagaattgatggtttttaattatacttagaataaatgaattaaatcttgaagttttaagaggacatttctattaataagatcatgactcccgtcagcttaaaggaatcaactttgttccataattctagataaaatcttatatagattgttttagaggagttttctccctagtaatcttccattctaattcttttatatcatcacataaaattaagtaaagtaaatccagagactttggcttccccattttttaaatagagattttaaaaaatattttaaatataaattattatgtttttcagaataagtaacatgagttttcaagttctaaatattacctcttaacatatactgcccctactcttttcaaatccatggatgcatttttcattcatttttattacatgtatatatgtaaatgtatgaacatatatatatattttcctaaatttaatcggctcaatgtgtataacattatgttatttgtatgcaatcattcagaaatgaacatttttattggataattaattggtatgctgttacctagagaagactatttctcctgctctcagcattccttagttgcttgtagctctttgtgtagggttgatgcattatgggcttttccccatctatgtaacatgagtacaaataaagtattgtctttattctttcttataaagagaaacatacaaagtgtacatgatgaagtctttgttttagaatgtgtcattctttctagatatacctaaattaaatattagattttctttctgattggcatgtatttgacatcggaaccattatacttttaaattttcattgctaaaaatgcaatgaactgtgaaccatgaaattactttccagatattctgtcatcaatattgtgactagtcaatgtttggtgagagctttatttacagcatgcttatatttaaggcaacactacacatatttccttagtagcttaggtatatttctaaaaatgtgttttctgaagttcttacatgaaaatgtagaattcttctcgttgaaaagatacaataagggttaagaaagtattttaaagatgaggagtgatgatattagaaagaagacagtgttactccattggagaaaactgattttccctcttccagcatgtataaattacagttcagttgttatcatttaccttagtggttagattttcattcattaattttttttttggttttttgagacagtttctctgtgtagcttatgagcctatcctggcagtcactctggagatcatgctggcctggaactcacagagatttgcctgcctctgtctcctgagtgctgggattaaaggcatgtgccacaacactcggccttcattcattaactttaaaattatataagaaaagagcccaagagaaagcataaaagtcagagatccacttgttcttattcacacactcagaaatcccataaaaaacaaacactgaacttggagccacaacataagcagaaactccagagaagacttcctgtttaggaataattgaccaatatataaggacttcatttttttttgtgtgtgtgtgtgtgtttatacatgtacttatatttggttacagtttggtggggttatttttttcctttttggatgatattttattttgtttggtttgggggagttttgttgatatactggatttatttgttttgtaagaaagagttggggggaatgaaggggaagatctgaaaggaaatgagagagaggaagaatattctcaaaacatatttaatgttgaagtcattataaataatttaaaatataataataaagaagagaaagcttactgagtctgtttttgaacaggatgatgtaagtcgagcaattaaaatggattcagctatagaaatgatcctccacattcaagacagtttctccattttgttctctagtgggatttatatgcttccttcaggttaatagttttctgtatccagtcctgcttcttatgagccttgtctgccttcagcttgtggatatgtcccattagaatctattttgttttggacacaccccctttccattcatttttatgtatacatatatacaaacatacatacatacatacatacatacatacatacatacacacacacacacacacacacacacacacacacactccaaaaacatgacttcttataaaagtttcttatatgtgaacttacaaagtatatgtataagaaggactatacaattcttattgtcatttttctataaccaggaaggaagagtcctgacataagttatctatcccaaaatgagtcagagaattgactttacttaagataaaatataaagaggcaagattgaggaaaacagcctaaagtttgtggtcaactaatacttagactttttagttactaaacatttagtaacttcaaaaattttggtggtacagcacatttacaagtaaatgatcaaaaccaatattctccccaatcttttgagagaaaagaaatttttaaggtaattattggatgaaattggagacaactgagtctctaaaactgtcaacattactgttataatctagtgttgttattatactactattaatagggaggagaaagaaggaagggagaaggaacagtaggatatttgaaagatgaggaagagaaggagaaggaaagagaacaggggttttaaagcatacattccaacaaagctaaaatatcatggaaatattataaagaaattaagtattatgatagaatggtcagtctaactcaggatggttcttatgattgccaagtccaggaggctgagaaaggtctataagcttttctagggtgctgagatcagtcagtcactaaatatcactcttagaatttgaaaccctgggataaccaaccatgcagttcaaggatgactattcaccacagtctgagttttgtaaccggctcatggggaaaatctgaagattaattagccggtacaaatgcgctgtgtataattgcttttattttgtgttgaatacaagaaaaaatgcatttcttaaattagtaagaactgagaaagaaaagatgatctaaaatacagcactgggtgcattagattaatgcaatcagcattctgtttaacaacccaattttattaagcttctaagatggcaggggaacctgaagaaaaagttcatgtgctgaactgaagtttattgacccagaacaactccttgtactgaagaaaagaaataacttgaccttttaggcccctggaattataaagccacctttgaattataattttctcttggggaagttgattgatcactactaaaaatgctgtcagtaaatattataatttcctaatactttgtgtaggattcctgtaaagatggagattgccattgagacacaagtagaagaaacattgtttgtaacctcaggaaggaaaaggaataatttctaatttatttgcaaaataacaaatatgcataattcatctcttctggctcaattagttaaaaactgaagagtggatgaggaaaatggacttaatatcactatgtggtaagcacatggttggtgtttccaaatggagtagataatggcttcattaatggtgtgtgaatttctcaagttccacatgagcttctctatggtcttgtctccaaagcatgtaagccaaacctcatatcacactagaatatcatgttgaagactcactgaaaatggaaatatgacttcagactcacaataaaacaataaaagaaaacattaacttgtagctaaaatttctattgcactactaccagaagaataatattaaatgtaaattgctaattatctaaatgtattttgttgtacctttttttatttctccctctctcttattctccccccctcatctgtatcacacatacagatgcaatgttgaatattcactttacaagtaattatcaaatgatttaaatgcatgaaggctatttatatgtctatctttaatacttttgaaaatagtggcacacatagagcaggttacatttaaacacccagcatttccaattgctatagacatggggcgactttgcatctcaatgcaaaaccaaggtgggcatccagctcccacactttaaacaaaaagcaccgtatgacagaaagtaggaaatttgcagttggacaagtaagcatgttgtctaaatgaaaaaaagagaaatgtatctcctgctagctctattgatgaatttgtatttatgaatggggattctagacatctttagagggttgagctgtgtataaccaggggttgaaaatttccaagccttgacaagccttaataacttcataatgcaacccctcatatagtaaattttctttaataataatcatttctactacaggtttttactttcagtggaacactaaatttttgtagttgttttgttgccttgatagacaaatggttgcatttttgttttgtaattttgtggcttccctgaaagtgtgaaattaatttccttacttaagaacacttttgaaaatatctatccttagccatcagggaaatgcaaatgaaaacttagttttctccaattgtgtcacactggggaaacaaaacattcctaatggttggccctatgctcagcagtagatggccaacacgaaatgagctcaatagcatctttgaaggctcactgtctcatgatgttgtatcaggactttttcctcttcttaactttacaggtcctttgcatataattatggcttcctatggaatcctgtgtgtgaatgagtgtgtttctgcttctgtgtttcttatatttttttgggggggggggctttttttcttctgtttatttttttgtcctatttatatttgtttgttcctgttttatcttattttacttcatttttattcctttgatgcctctttgttttctaaggagatgcagaaatgtgtggatacagatggaagggagtcggagaggaactgtggggatttggggaggagaatcagttatcagaatatattttatttaaagatctattttgtttattatttatttatttgcttttttacttaatttttcttattttttattagttcaaattaggaacaagattgcttcacatgtcaatcccttctccctcttcctccccttccccaaccccctacctgctcccatcccatcaaccctccactccccaggcaaggtagggccctagatggggctcctcaaagtccaccacatcatcctggaccgggcctaagccctcccccatgtgtccaggccaagagtgcatcccttctcatgggatgggctctcaaagtcctttcttacaccagggaaaaaatactaatccactaccaggggacacctagagtgcagaggactcctaattgacatccatgttcaggggtctggatcagtcctgtgctggcctcccagacagcagtctggggtccatgtgctcccccttgttcagtccagctgtttctgtgggtttcaccagcctggtactgacccctttgattttcattcctctctctgcaactaggttccagagttcagttcaatgcatatctaggtgtctgcctctgcttccatcagccactggatgaggtttctagggtacttttaactaaaactacagaaagatggagttcatgactcctgtcttctgagtatcaattctgagatcatgtgtttaaaatctgaaattgcagaaacctgccatgctctgaaatattacctgagccttcagtactctgatgcagtacctttaatcatgatgctgttctgtgatacacaatggacataggcaaggacaacaaacctcgggtttatctgtcaatcggtacattagtattatgtgcaatggacctatttaattatgattctactaagtaccatgcggctgtgttgtgaaagcacttgaatttaataccaagctctgaagaagagaaagcaggagaggctgccaagtatgtgagaaacacagtcttgtacacaagctcaaaaatctacacttaaaaattaaaaaaaaaacaaaaacaaaatggagggaaaagtgttaagcaaaaattctaagaggcagttctaagcagtactttcatcctgagaagtttgggtataccaacataggcaaaaacacaatacaaacatgatattcccattaggtttggtgaacacactgagctaaactgaaatgttcatacctgagtgtatcaataaacaaaacatgcatttttactgcatcctaaaatatttatattattgtaaataatatatttacaagggtatctcagaatatatttgtcaaattatgagtgtatttgttttgtgtgaatatggaagcatacgaagcttgtgtacatgattaagttgatgtttgtatgtgtgcatgtacagatacatgtgtggaggacactcagagttctgctctgttacattctgccttattccttcaagtagaggcctcttactgaacttggagctaggctgctagccaggaaatcccagtgatgctcatgtctttgcatccaagtatgctagagttaagcgtggatcctaaatcactaggcatcttttattctttaagcattttttctatattttgcccatatgattgcattgttttcacataagcatgaataatacatgttatattgggcccatagaggtcagaagatgtgctgcatccttctaactgcagttccacataaaaatgagataaccatgtgggtgctagaaatcaaatgtgggtcatctgcaagaagtgcaaatgttcctaactactggacaacctttcaattctcagaattagttccttatgtgggtactggtattagaactcaggctcccaggctttttcagcaagtgcccttacccactgacccattatagttcattctttaaatactagcattatttggatggacatcagggaaacatgagtaattgatttgaacgtttaattaccacttctggattcaggtataaattaaacagttgaactgactgcatagttttgcagcatatacaacatctcatttaatcttcatgattctcttcaaatcactgaccatggctgaagtgtgttaaaggacctaactagaacattaacatctataaatggataggctatgaagataaacagatttcagagaacaacccgaggcagtgcaccagtgatgacctgcctcctgagacatcagcaattccacagtacttttctgaatgctggaaaagaagaggatggacagtagattcactggtgggaaatataatctctgtaatggcctttgtcacactttgcagcttataaaatgttcctgtgagacaaatgtgacacacttagttttgcagtgagctctttagggtccatcagtcttcagcgatgtgtcaggaaagatactaaaggcatggtggagtgtgttcctcaggggagttttatcagctctttaataaagcagccatttgtaaaatgctgctggagaaaacaataatttagaagaaattcatcaagagcaatggcaccttactttgaaaaggcagtgcaaatggagaaagggaatccagtgctgagtgcttcattttaggcctgaggagcaatcacaaaggatcaggggcaagctaatgttgggtttgctactctgtatacaatggagtatgaaacaggttttccacccacaggtcactgcaccttgaacttcaaggggacaatgatgcctgcaaactttctgtgtaaaatgttagtataaaaacttattcatggggcttgagagatggctcagccattaaaggctaggctcacaaccaaaaacatattcatgaatgtttctgagacaaacaagtgttccctttcattgaagtttttttttgtgtgtgtattaataatgtaacatcactgtttagaaacatatctccttagaacattatgttagatgtgtattttattgagaatccaggactaaactagttagtatgaaacaggtagaaagattatcagtaaaatttcttctcttaaaatgttttgtagtttgtgttgagatatcataaacacataaaaatgtattgatacaggatgtcatgtatatatgtatatatgcatatatatatatgagagatgattactatgatgatagaggacagatagatgaagatatatatataatatatctagataagtaggaagacagatggtagataaatagatagatgataggtagatagataaatggatagatggatagctcctttgagacagaggtttgttatgtagtccaaagtggcctagaaccattatattctaggtgaatacctttgcagttctccattctcagcctcaaaattgctgggtttgcagacttgtgttagttcacctggtgtaatgcctcattttaaacaatataaatcttatcctattaccaaatgtcaaatttaaagtacagtgtttttaatcatctcgctgctataaattaggtacctagagctgtctcttacattaatgaaagattttgtcctttgatcagcatttcccaatccccctttattccaaactgttggtaataactatccaattctctgcttctattgatttgagtatttcagattccattataagggaggtggtgtggcattattttctttctctggtcttgctaattttgcttaacaaactgagttcagatcatctatggaatttgctttagtttgctttgtgttgatatcatgaagattatgactcaagaaaagaaagtttgtttgcctcacctatcctatcaaccagtgaagtaaaatcagcagctcaaggaaggatctaaagcagggtacgtggaggaatgttgtttactgactggcttcctatggcttcctcagcttgcttttaatagaaagcaggaccccacctctgcacctgcccaggattggcacatactccagtgtgttggacactcatacattattccttaagcaagacaatataaatatattggcattttctcaataaaagtttcttttccccagatgattctaatttgtctatgttggcaagaaacaaactaaccaaaaccaaaagttctaaccatgtatgtttgtatgcatttttatattcattcaatccccaaaagacatgagaagcccatgtcaggctttaaaaagtaaaagaaagcttcacacaatctttttaatgatattatgtttgaagctgccagtgcttttttgtttctgcacctggcttgtggatccatggcgaatttgtccactatttggccaatggtgggggagagttcaacgttctccttgttaattcctggggaatgctggggagttacaagtgaggtcgtggaattaggaaggttaaggttgacaatgatactaagctggctctgcaatgcaggagggtaaggagatgtggatctcaagagtgattcctatcatgagacttttagtcctgaaaaaaatccctgtccaagttgccactcttgtcatttccacttttgctttttgaatgagccagaaatgttttcagtagtttcttttattctctttttccaaaaggaatggtgatgtagatctaatataatgtttaggaatagaatatacatgggggctgtaagtgagacctggcaaagaattgagctgtgtagctaacacctctggatctgtagttatgctcagaggcctttctgaaagctgtctgaaagctgtcctgtcttctcattcttctcacttaaccattcattgaccaaatgtttctttgttttggggtattttatgggacatttattgaatgctggaatttccacttcagtaattatttctgctactgcagtgttggtttctgattctacagcaagtacagtgttttcaatatcattctgttgtgacataacttcaatgtcaggaaagatggctgtatttctaaacacatgctgatggtcctgtgtctccgacactgctgtccaatgtccatttcaacccattctacacattccctgaaaatgacctcaatgacaccgactcaacgattggcttggctggcttccctcgtatgggaaaataacctcctgttactccttttggcttccttctacccattcctactaattccccatgattaatcaccctcctcccttccctccttggacctttgatagggctcctcttgctaatcgcctttggtccttgagtctttaatcgacctgtggcgtttgtcaagcaacaagtggactctgctactaagcctgtcctgatacaatacttaagccctcctcttcccaggatgactttggcccctctaatataaacaattttgggctgttccctccaaagaggaactaacccacttcctcactgccagcttcagaggtgcagacctggatggtacttacaaggagacctcattttctgaggaatatccctgtgtgcaacggggttgatgtcataggcatccagtcggtcctgcctttcagatggctccaagaagccatccccaaggtcacagaaaaatgtcctttataaaataaccatagattctccaactgggggccaggcctctatccccctctactgaaaaatttggtcacttctttttatacaaggaagggggaatatgtagggagccaaagctaacttggcatgagatcccaggccatgcttggcaggccacatagtttacatagcagctccttagaacctcagctcaagaaaagaaacaacctgacccagtcctccacccacaggctccgtcacctaagcaacccttcctggacctcttactcataaactctttactctgccaaacatcctctttgtggcttcctatatcctgcatatactaacacctggtgcacaaacaacccattttgcccctccccatatcctgactatattagctagccagagaaaaataaagtttgccacttgatcaaaatcctgccttgtggtcgttctttctgcatctcttatccccattccctatccctgactctcttgccccacgttgatgtcctgcaggtcaggacactgcaacaataaaataaattagtcaaataagactaagccatgtagaaataactgttaataacttagtagagaaaactttatggagaattggcaataattgtatctggtcactctggaaagggtaattacatagaaagaattcatattcaaggcaaatttaagaaagataatctgtgtgttgattcaacctttggattattattactattattaaccatttattaaacacctctgttttttttttctaggcctttggaagtgctagaaatatggacatcagtagcaaaacagtatttgtttggcattatagaagaatgccacacaggaacttatagttgctatgaattcatacacaagacaggtacatgatcatgtgagtcactatcctagtatgggcatgggaaagattaaaaaaaattccattcctaggtaagcagctttttttgagagattgtttctggagaagagagagtaaattttcttaagaatattggccttcaaatctagatatgctctagtagatggtccaatatatctacacatatctagcatgcaaagaaacccaattaaaaaatgtgaatttgatttgggatcacaaagtggtggagggatacgggacactttgaaggggaggctaatacttgaagagtgttcatgggctttggatctggagacaggcttgtgggtttgcataatttagatttagatttttttctttcttttagtttgagattataatatagttacaccattgaccacttccctttctgttccctgaattctcccatgtacaccatcttgttctctttcaaattcatgacccttttaatgattaattgttgttaaatgcatatgtgtatatgcatatacattcctaaatatatccatttcagtctatacaatgctacttagatacatgttttcagggttgaccattcagtattagaaaacttattggtgtatagttccctggggtagatgattactcccattctcagaatttattagtttcttatagtactttgtgtagggttggggcctgatagtctttttcctggtcagttgtatttctttatttttgtcgttgattagctcatgctttaggtattcaagttggtaagattttataaggtgtagcatctgagattactaggtgacactatagcaccaagctccgtgatcctctggttcttaaaatatttctgccccctctcttctgcaatattcccttatccttacttgtgggagttgttttgtagatgtgtatgacaggagtatgtgccatgtctcagcattgtgactggttgtagtttttgtaatgatctctttctgttgcaaagagactcttccttgataaaatgtgagcactgcactcgtctgtgtgcataaggacaaacatttaaaatatggttagagattatactagtttggtaattatttcagtagtcctttatagttgtctaggttacctgtacaaggcatgatttcccacttttggggaaggtcttaagtccaactctagagctcttggttacccctaatgcatacatataacactactgcatctttagggctactatgccatgctggtcaatgtcatggttcacaggcttcatagctgtgtagctctgttgactgcatctctcttttggaaggttgcattacttaaccactgttaagtaatggagggtgaatttgactaaaacatatcatttgcatatatgaaattttctagaaatacaaaagacaattaaagcatttgctgtagagccttgtttcttcaaggaaggggctctattgattcttttttatctgagtgtatgatttggcccaagtcatgtttctaacacacctgactggcttataagagatcaaatagcattttcttctgcagattctgattatagctgaggtttgtaaatcataaagggttggtatctcagtgtttaagccttgattaatttgggaccctcttgagttctttaaggatccatgtgtaaagaaatcatctttctttatactaatatgcaggactcttcctgatctaattcaagacatattacttgtcacacagcagataattatatgagtgatattgttaatatacaaggactcttgcttgtttctcatgatttatttttatctgcattgtttcctaaggaccaggctcttaggtgacatgctagcccagcatacacacaaacagatggatacagtacatagatcatttctttccttgactttcagggactacatattcatgcaaatacaattgatcttggatacatgtcagaaaagttcattttaataaaatcatattaaaagtctcttttaaggaatggttgggatttctgtaaagatcagcctgttatgagggaagaagtagcattgtggttttaggagtgttacaagcaaaataatcaagatcaatgctacctggctttcatttatttttcagagaatagaccattttgtcctcacattgatttttgttgacacttgaaatgtttccattttatgatgtgtgtggtttatttatatccaggcactgctagacataccagctttcaagggaaggagaaagacagcctgggcatgctgtcattcagttctaccacttccattcttatttacaatgcaaatgtccctaaggaccattggctttaggaaagaaagatatagaaaagtcatttttaggattctctataactatagacatattcaaagtttacctccaaggagttgaaatggagattttaggaagcctttttgtttttagaattgagctgtaagggaaaaatgtgtacagctgtggggtcagagagacaactctccctagaaagtacttgggaggagattatgaaaatgggaattcaagtcaccaggacatgtctaaactttgggagtttagtatgggagcctacctgtattcccatcccacaggaggtaggagaattccctctgctagattgttagtcagtctcaaccaagtgatgaactccagattcagcaagagaccctccctcaatgtatagggtagagagtgatcaatgaagacacataatgtctttcacaggttggcttcacacattcgaaagtatatatgtgtatgtacttacacatatgggagaatacatgtacataaaccatacacacatataaactttgagagagaaattaattaaacccaggtttgagtgccctgtttactagaaacaatccttaaatgcatagttattataatcaacaagaggtttagttggtaaggcatgtgtaccattataagtgatgagagagggatagatagagtaattcatagcacatcatttgattcctgcagataactggattatacctcgaacactgttctcctttacatttcttgctttttatttcttttccaatgctagcagtcacacttattgcatgtgaccaatatcagataagatctgtacaattgcaacacagtgattagcattttcctgttgaattgtccttaatacaggctgattagaagaaatgatgctgtgtgtccagcttcagttccagttcttaggacactagctactttagccagattgagcttttctcagacaaaagtctagatttctttgctttccatttcccttcaaccaaatcacaagaatttctgtttctatttacgtgactagaatttgcctcaaaatactttgtgaaggagacagcacatattttcaatgttgtttgtttcttagtattaaggatttaatgtttagatatatttattttatgtgtatgagtgtttttactgtagtcaaaagagggcataaaattccttgaaagtagagttatggatgattgtgtgccaccctgtgggtgatagttaatgtacccagctcagttccaaccagcaagtggtcttaacctctatgccacatcaaaagctttattttaataccttctgcaacattagtgcccttgatggaggacatagatttcagacatgcaaagctttccatagcatagaataaatactactttcaaaaactgatcatttgcttcaacctatgtcaacttgaggtaaatcattttaatgtgttgcaactcctgtaggagtctcagaaactccttctatgacacagtgaccccactataatccattctttctcagctacttttccatagcttcttaatttcatcactcatagctatttgtcacacagtatatgtgaaactaaaatagaggtgatatttttttcttactgcctctgagctactaagtagtacagatcacagttctgaaaaaaatctcctaatagatcctttccccagaaatataacttctcttacagtgggtttgatggaaaatttagccatatcaattggcatgtcattaatttgagtccattctaaagtgtttgaggtcaattgagtccatcttccatttttaacacatcttcactttctcagacaaaatgatcttaaactccaaagacaacaaaactccatatttacttgtcctgtttcatcctcttgacacttctttcgcattgggagggtggcaatatagtaaaaaaatattaactggttttgtttttgtatttttgagatagagtatcatgtagcctagactggccaccagctcactgtagttgagaatgaccttgatttcctgatccctctgtccacattaatggttgtgtaagtgctctaccaactgggttacatccatagtttccaaattgtagttattctgttcacaagagagatatattctgtttctagacttaagctatcttcataatctatgtgtacttcagtgtggggcaataaaccaacgttaagtaggagttttatgtcaggtgacacagaccttgtgagacccgagagtccacctaacactccctttataccattttgcatgcattatattttggaatcactagatttctacattcattattaattgatataatgattaatatataatttcaacttaactggatcaagaattccaaagagacacatatagagtcctgtgtgttaagatattttcctaggaaactgaaggttgaggtaccagcataaagacgacaaataacaaataagcaaaccagttgaatactagtgttcatcttctctttatcccaacaggagatctaatgttactgagtacctctcactacttcatccatacctatcttgccatgatgggctgcatcatctcaaattttaagccataatatgccattttccctttaacttgcttcttctttgaaaattaatcatacaatgtgaaaaaaacactagttcttcaattatctgtaataatcactcagaggagcacaatattatttgaaaatgacagcatcatttcacatacaagtttcaaatattgagatagcaattattttcttcttaaatgattactacaaggggccatagccaccactcatatattgtatttactagttgaggtaacagtctactcttcaattcaaatgcataattgtcaggatagagtagattttcttctggaaggggacatgactaagaattgtgttgaatataaaggaactgactaggctttatcagacagcccccctttatcgcagagataaaaagtagctcttatatcctcatccatgtccacacaacagcaagggaaatattgtcaagatgcattttgactgccagacttccaacttagcaagaaattacatcttcaagaaagcatacccaaaggtcattctgtctcatggagtttatgatatcaccaacagagcactttaagattggaagaaaataactctagagttggtattccctccaagcacaccaaaagttattttaaaagagcttaatgagatggaacagtgtagcagtgtaggaatagccaactacgttgggtgaattttggactgatgtgtttatttttaattattaattaaattgatcttttaattaaattgatactgagtttttctacagtatactgttacatcctccaaaatcaaatggatttatcatgcagtagaaataatagtcaggacaatttttctgtgtttgccaagcacaagaatccttataaggatttcaacagggaaagtgtgaattaaaaaagaaaaatagaaacctggaaaagaagatttcagtatacagattaacacagaatgtaggaaggcaaaagtttccagttaggtgctagaagttcttctgtccaaactggaaataggctcagtaattctcagcacagttgcttgatgatatataaaattgtctgctaaaatacagttaatgctttcaagtattttacagtgttgtaaatacagtttcatgttatataagttgcatttgttaggactgattatcagattttcttttaagagaatcactgggacttttagagttggacctcagaaaaaatatttgactcacagaaaaacaagatgcatttaatctccaaaactttggaattacctaaccatccataagaaaagggtgcaggatgtcctgggaaatatgggggggtctttgttcttaccatactttatagtgtaatactattcagtataaacaacattagaacatgaatttaatgttaatgtaattatgaattttgcttatcatttttatttttccttgtataaaagaaaaaagttgaagttaattaaattgtgttgtattttatccactataagctgttatcattagacacataaacataaatttattttatgttgcatttttattataagtaattgaaggtctatgtgagtgtcaatgactctttgttatagctttgtctaagctacttttcttttggtgtaagggaataccatgaaaaaaatcaatttgggtggggaaagggtttgttttaggttagaattcttaagctatattatgtaatgagagttagggagtgtatgccagcaagaacaagcacaaatcttgttgttcacattcatttgtacacaggaagtggagacaggaaagaaacaaagagtggacatgctcaaagcctgcctacaactataaacatagcccagaaaggctccacctttctgggtggaggttctacaacattcccaactagcttctgaatctggtgaccaagtgctaaaacatgagcctttaggagacatttcaagttcaaaccacaacagtgtagctcttttgaatttcagttattagtcatcacacaaagtattatgttccactgaggcattttcaaacataacgtgcttcccaatcactctatgtacatcttatttcctcttccctagcagcatcacattttctattacctgtctgtccttcaaaaccattttttccatcttggggtcttctttctgcacacacacacacacacacacacacacacacatacacacacacattaaaagctaatttgcacatatgaaagtacatgcttgcttattgtctttccaagtttattacctcactgatataatgatttcaatagcctccctttttcctactaatttcatagttttatttttctttacagctgaataaaattgcatgaagacctaggctgattctctttcttcagtattgtgaatagagcagaataaacatatgatggggatgtccttctgtatgctatgtacatatgtttcacctattggctgatgaataaagccaatggacaggcaggatttagccaggcaggaagtataggtggggctaggagactagcagaatacagggaacaggaaagacaaagagacaccaggtagctgctgagaaagcaagaactcaggaatcacctgtaagcgaagaccaggtaaagatacatagaaatgggttaaataattaagagctagccaataagaagcctgatccataggccaaagagtttataattaatataagcccctatgtgtttatttgggactgaatggctacaggatggggtggaacagaaacttctgtcaacaacatgggcattttaatatatagaatacttaataagtaatatagctgggttctactatatatctatatctacttgttttttttgtttgtttgtttttgttatggtttggctttgttttgcattggttgagaaacacccacactgatttccatagagctatagccatttgaatcgtaagtggcctatatggtcccatatgcagcaggtaagttgtcagcatctggtgctattggggggtaacagggccaataggagtaggaccagctagaaggaatttaggctataggtgtgcccttcttgtcttttcacttcctgagcaccaggaaataagcacttttgttctgccatacattttctatgtgcttattgacatgatcctccaaacaacagaaccaacaaattgtgcattggatcttttgcaataaagccaaaataaatatttcatctttataaattgcctatatttggtatatgggtatattgctacagaaattgagaacatacatctttgaaatgtgggatagatatatatatgttcacatgttgtatgtgtttatggaattgtacaatgaaattgatgggatatgaaattccttctctaaggtgatgtccatgtttaataattatttgacaaagtaccttatgatctggtcatatttgatcagctacccattagcttgacacaagaaagaaacttgaaatgtgctgctcaacttcatgatagaagaaagcatgactcctttttcctcatttcctcattctttaaccataaacaaagtaaatcaaaacaaaacaacaaagaaaaaagttcaacaaatgcaacatgttaagacaaagacatcaaacagttcaatttgtatttgctgactatttactttgagcaaaaaatatggcaaaatcaaatcctatgaccttgaagagcataatatgaagcaatggggcatagacatattctgaaaactaaccaatattaattaatgcaagtgactaccaaaactgttctctggagataaagtgatacagagcttggagaaagaaatcaacattaggattcagggtagccttcttgattaaagaagtgggtctcggctgagtcttagggatgaccagtgcttccacatggtgcagacaaacgttagcaaaattaacactagctgatattcagtgatttttttcattgttaaaaatattttggattgcatgtatattattgtaacttattttactatttatgctattgcaacttattttactatttatgttaaaagaacaacttctctagttggatcataaaaatgcaacagacttggcagttacaaccacagggatgacaagtgtcatttgtacattcctgtacagttttgaactgtgtcttcctaattttatagtcaccaacaaaaatgggcacctgtcattgcctgaggcttacctagaagcttgttgaatcaggtaattataattgaaattagattcctgtatcaaacaactgtgctgagtgtttcttggcctaaagcagtagagttcaagctgagaatagaggtcaaatgaacagactgtattttgtataagaacaatggtaccacatgcttcgacttaggttgtttacagtcaagatttaaatctctaggaaaatttacaaattattagcagtataagatcaaagactttctggcattttatgtggcaatcagattctatcataataaggaatagaaaaggtactgaggattgtgggaagacattaaaatataggaaacaaagatgttttctttatgaagtttgaaagtgcacaaggattgaactattagcataagagccagaggatcaggaaccagacttctaactaagagaggaaactgtacccacgaagtataaattaagctgtcataatgaccacaacagatgacatgcctacattgacaggggccactctaagagtttctgctcctacatgtttttttaatggctgataagagagggagaatcagtttcctccaaggacaaactgctgttttggttgttccattccaaatggttagcactgaacatgagcaatgataaatagactcagtagggtttgtgtgtgtgtgtgtgtgtgtgtgtgtgtgagagagagagagagagagagagagagagagagagagagagannnnnnnnnnnnnnnnnnnnnnnnnnnnnnnnnnnnnnnnnnnnnnnnnnnnnnnnnnnnnnnnnnnnnnnnnnnnnnnnnnnnnnnnnnnnnnnnnnnnnnnnnnnnnnnnnnnnnnnnnnnnnnnnnnnnnnnnnnnnnnnnnnnnnnnnnnnnnnnnnnnnnnnnnnnnnnnnnnnnnnnnnnnnnnnnnnnnnnnnnnnnnnnnnnnnnnnnnnnnnnnnnnnnnnnnnnnnnnnnnnnnnnnnnnnnnnnnnnnnnnnnnnnnnnnnnagagagagagagagagagagacagacagacagacagacagacagacagagagagacagagagacagagagacagagagacagacagagacagagagacagagaggggatggaggagaaggcaggagatgaagagagagggaaaaaggagagaataataaaagaagccttggattttggaaggatggccagacatgagaggaggtagacacaggggttgaatgcatatattcttatgttagtcagttctcaattacagtaatcaaatgttttagacagtcaacttttaaaggaaacaagttgtctgtagcttacaggtttcatgatttcagcccaggacatattgaaatgactgttttggtctgttgtggataatttcttagatataattttgaagaggagcaatggctctcacctcaaagtggaaaaagaaaatgtgaggagactggtgttctgcaatcccattctgtggcatgctgccagtgactcagagaactgccagtgggctccacatttgaaagttttcacccacctccagcacttgggggcaagacttccagcatctagctcattgtggggggatttaacattcaaattgcagcaatgtcctaattaaatgaatctggataaactatacagtttctatattgtattttgaaaaatctagaatgattagttttagaaatataattgcttgccaaaaatttgaggtaggaaggaggaagtgaattgaatggtgttctaatgtagtaaattagtgcacctgaaactatcacagaggatacatgtcttcacataattgtaaaaaaaggaatttctgtaacagagggttaagaacaatgtatattttggatgatagtaatgatggatacatacacattcactaattttaacaaaatttcccaaacaataccacctgtattcaagaaagcaggtggtgctgatggttacacaggactccataaacaggttgtaccttgaacctataagtgtttggtgtgctccagggcctatcctttttgctaaatctgctgatgcctgatacccttacatgaaaggatgctgtatttacatttaacctatgcacatacctgtatagttgaaattacgttatgcttatttataacattaagtctaaagtaaattctattcatagttttggtgtattacttgggtcatgccagaaataaacactgtaatgttcagaacagacaaattttgtttccaagtatttgttgtatcatggttggttagatttatggatacaaataacatacacattggaggctagctataacgtctgttcaattgttccatatatgtacaattgcatcaaaaaaagtctactaactaattcaaaaataagaaagaggaaaaatatgcagtcctatgcagttagggtctaaacatgaaatgtaacaataggcttaaagactaacaataggcaaacctttgcttgtttactgctaatgttactgttctgattgtaaattgactcttatcataaacagccttgtacattgtgaaataaatctcctggattttatgcatgctaaaattggttcttagcatgtaaatgggctccctttattcttgtataaagcccataagcttctaatgagacaataaatcaaattgtatgttattaagaaatattggatttccagaggtttgtcaccctttaagacttcctgatggagaaatgtgaaattaaggcaatgaatttaactactgctgaagatggacagtcagtcttccacgctcttaatctcaagcgtactgaggttattgctttttttttttttagacagggtttctctgtggctttggaggctgtcctggaactagctcttgtagtccaggctggtctcaaacgcacagagatccacctgcctctgcctcccaagtgctgggattaaaggcgtgcaccaccaacatctggcgaggctattgattcttacataatgcttcttcctaccaagtgtaaggcagagaacccatggtactataatttggctctgcaagcaggggggcagctccattgaggattaagtatttaacatggaggacactttcctaaaatcccaaaataattttccccaatacttgatcccatgtgtgaaactctatagtttatttctcataacaaagccactgacatgacaagttataaagaaaaaagtgagcccatagttctgggagttcactgtctatatgccccatttggtgatggatttctgtactcacagatttctcccttattatggagtcatgatgaatgtaggtccatactgagaccctcatgtgacagttatctaatcctaattgcctttcccaaaccccagctctcctcaccatcttagtatcttgcaatggttatttagactgtattagtaccatgaaaaaaccccataattttgacattctgttttcaaatctcactctcacctttgagaaaataacagtgaggaaagagcacagtcaataaccatacacatacaaaaaatgtgctgtttacaactttcttctgtatttgtcagttttaatggatgtattctttatgtataaacaccttgcttatatcatttctaatattaattgaaaagttaagttgtagctcactaacattcataagtggcacaaatatagacaattaaagaaaaaatgtttttcacaatgtcttttacaccaaaattgctgttttctcataccattcttggagattacttgtagaaatgaatattgattgccactgcaattttttctgttttctcatatgaaacacacacacacacacacacacacacacacacacacacacacccccccatgtattgtaattgcctccatgtcctgttatttctcttaacctctgttccccagagtttttctttaaaaataagtaaacataggataagaaatagtgagggttagaaaacaccacaaatgactgaggaatattgcaaaaaataaaataaagtaacaagacttatcctcttttatgtatgaaatcactatataggatgtatgctgaaatctttaataataaaattgaaattgctgaataaagatggagaagaaacttcaatttcttatccccacatacacagaggatggtgaactccagatgtacatttctatttacttatcttttgactagtattttcatcagatactactctaaacactggattatatttgcacattgctattatttcacatcatataaattattttccaataccatattttatgcaattaaaatgttctaaaaatgacttctaatttctggcatatagtagtagtggtgcaaaaatatttgctcagtgaatgaatgaatgaatgaataattaaaaatacttctggcaagttttgcttggtatcattagattaagctgtgttttttagtgaaatttcaaaaagcaccctgactactcctcataatttttctatattagttttaaaaatccagcaccatgtttctgtaattatatgtcaagtagaacttaacattaaaattgatggaaataattaaacacctctttgcatatacaaatttctcctaagacattgatttgcatccatttcaaggtttattatggatggaagaaagtactgagtctatttggagtttacatgggtaattatggaagcttttctaagtgcatcatgttgctcttgaacaaagttatcatatttactcatgatttgtgttcttttttacaaatgtaaaccctgaaattcattcatggggtaggctacatgccagcatagtataaatactatgcatccatatgcacattaaagcaataaaaagaaatgttattttgccatatatctcgtatgctatagtttaaatttttccttcttagatgtgcattaaagacttgttccactgagatggagtgatatttcagttgataaagtgtttgaaagcatgagggcctgagttgtatccttaggcccaacataaaaagggcctgagttgtattctggcccctctgcaggatctgtgggtgacctgtaatcctagggtttaggaagcagaatccaggatctgggaaagagaacctgcctgagtaaatcaagttgaaaacaattacaaactatttaaattcaatctttgttttccacatgcatttgcaaacatatgaatacacacctgcacatatgtgtagccacacacatgtggatatacacgaactcacaaatgcacatgaatagaattgcacactgtattaggatgtaagacgttggacctctaagctgaccaagaggatctcacattctcttagtctttatagcacatatgttggaacactataattgcatattatttccatggccatttgagaggaaaactttataccagcttcttgccactttcctgacaatccaaaaatagcacacacatttcattatgttattttcaaataaaaattgttttgttaactgtccttccactccccttcatcctgctaccaataaccttgggcactttgatcgaatgaataacccttctgctgccatggtatgtgtgtgcacatgtgtgtatgtgtatatgtgtgcagtcatggctgtttgtgtgagtacacagatgtgatgtatgtgtgtatacatatgtgccatgtgtgtgcctgtgggtacacatgtgtgtgtttgtgttctgtttccccatttttctcagtctttctttgttcactttccttggtatcctttcaagtttcacaagaaatgtctttctgaagcacctcatgaatggttctttaactggtctaaacgttgcaaatgtagtagaggcaggttttgacctttaccctttcctctcccttgctaattctaagattacattactaaagctggcacccaaggtctattctttattttcctccaattcattcctgagactaaacaccaagattcagcaatcaaaattcatcatttggctgcttgagctaaactgtcccatcaggacttactgactaatcctaatatagacttcttttctctttaaaattcacttctaaagaaacacctgtttcagtccttgtccagtctagaagcagtcaccctttttttcctagcccctatgattgtccctcctgactactagatttccttttttgctgacaacttggtgtctattctttgctaagaggttggccctaacacctaagttttgaaatattgccattaaagtatggtgcatctaactcactttctggggagaatcaaagttcagacaagcagaaaacagcaaggtcagatcacatatttacactgacaaacatcaccagaaattcttccagccttttctaccagctcactcactattttttctcttttgttgaaaatagatttttacctcaaataatatatcctcatttcccctagctctattccttggtttcccttccctctactctttccaattcctcctcacttcccctcccttctatcttttttccattttttattagagagcagttttctaagaaacaataataaaatgacaaaattaaaaggaggaaacaaaagcaaacatcagaacagtacaaaacaaacagaattaaaagatcccaagaaaaataaaagtacaagtagtatttgtacactcaagaatcccataaaagcaaacctgtagggttaagaagagaaagagagaataaataaataaataaataaataaataaataaaaataaaaaatatcccagagacaaggaatcttcaatgatgcagttgagtttgttttttgttgactatctactgctgtctctacttgttttgttttcaacacattccagtcctgtggtaatattcttgatgaagactgctgtagtttcctgacatgttcaacctgacttttctctgcctgtttctgttttaagtctaacactattcagaattttcttatagtttactgaaaattttaaagacagacaaagtgatgttacatttcaggatagcaaggcagattggcatataaagcaaggtcaacatgcccattgtcaaaaaggtgataatcatttgaaacatgtcagtaaagatgacattgtcacatttgaagcacattttgaaagcagaatttgtcaagtgctttgtaagacaggtccattcattatgccatttgcatggtaaagcaagtaacttattatctaataggtaagagtaagaaaacagaacaattaatcagtcatgtgttatgggttggagtagcactcttaggaagtgtggccttgttggaggccacacttgtgtcacagtggaggcaggttttgaggtctcatatatgatcaagccctgcccagtgaaacagaccacttcctgttgcctgcatatcaagatgcaaaactctcacctcctccagccctatttatgtctgcatgcctccatgtcttaccatgatgataatgaactgaacctctgaaactgcaaaccattccatcaaatgttttccttgctaaaagttgctgtgttcttagtgtctcttcacagcaactgaaacacgaactaagacagaaactggtaccaaggattggggaattgatttgatggtcctgatcatgcttttgtgtgaaggaatatggaccttgggactgtagattagataatcagttgaaagctttaaatgttgctttattggaacatcctagtaggagcatgaaagacagtggttttgagtgtgatttgaactgtgggtggctggttcaagaagtttcagagaagaatgttagtatgtggcctagacattgatcttatatttggtaaacaatgtggatgccttttacccttgcacagagtctgcctgagactaaagtaaaaatatttggattaattacactggtagaggaaatcttgaaacagcctagtactcactctgttgtgtggcttttactggtgactcttatacagatttataatgaaaaagtacaagctgagcaaggaaaaaatatttaaagagaaaagaaaatgcaagccatcccactaaatgttttcctttgtaggtgttgctatggtcattgtgcctctctacagctacagaaactgtaattaagacatgggttaatgaggaaaccatcatggaaaatattacaaagccaaagtaggcacaaagtaccaagcccagggtctttaacacacaggatggaattctcagtcctgaggctatatacaaaatgtgaatctacattttcctgaaggcaccttatatctcctgttccattacctttttacatacaaaatacacaagtataatctttgggtggcacatggtacatattggctgccaccttttcagtgtctggatatatcagctgatcagaaagtttacctttggagctccctgatttagagaaacaattgcattactatgtaggtcatgatccaggaatttcagagtgaattctcaaggccatttttagtaactctgttcccccaaagtaaaactttgatagagaataaattgtagtatttagtttaaaccaggaagaaaatcccattttccttatcaagaatagaatataaaattatctacatattcctgctttatcttcttcaattactgctctctgtcacattctcaattatatagtatgtggaatcctagcactctaaacacattttgatattgtaaacattttcaaaaacttttcaaaatatgcagaaataaatataattgcatactatgatgagtattattggttgtcaagttacagaacatagaagtatctagaagaaaaacctcttgttgtgacagtgagaatttttagactagtttaattgagccaaaaatgttctaaatttgggtggtgaaattccatggtctggggttctgaactaaatacaagggatccagcaagaggagcaccagttctattcattatgtttcttgactgtaaatgtgataagctcagcctcccccagctctgtccaccattccttcaagggtataattgaatataccctctaactgtgtaccaaaataaactattccttccttagttatttttggcaggttttcacagcaatgaaaaagataatgaatatgcatgtctcaccccatgtgttttcctctcatctttaagaattttcatcatgggcaatgtcatttgtctaccagacaactgtcaaatattttttcagtcccagcacaaccagcattgctcaatattgtcagaaatgtaggattctttacatcttagatctgaatcatgagctctaaggtggatgctgcatattgatttgtattttaacaagtcaccttggtaattctaatatactgtgatgactgatgtctattgatataggttcacaccattgcccttacccagatagattaagttgtaattgatttagatggcatgcatcatttcatttttagtgtaaacatttcagtgtgaagataaatacaaaaaacaatatgttatcaatatatgtaagcatcctgctactgttcagctttttttgattttccgagacagggtttctctgtatagctttggagcgtatcctggcactctctctggagaccaggctggcctcgaactcacagagatccgcctgcctctgactcccgagtgctgggattaaaggtgtgcaccatcaaagcccggcctgttcaggttatttaacacattttatgcttctttgcttgactcagaatcccaataatgactttaaataaacactggctctatgccataaatgtttagtttatggtgtttctatttccttctgatacacctatttaaggtgtatatttatnnnnnnnnnnnnnnnnnnnnnnnnnnnnnnnnnnnnnnnnnnnnnnntatggtgatatattatttatgatttattaagtcttgcctgaggatttagaaagcaaattcagcaacaagctgtagatgtcaggcagacgtgatacacacctttaatcccagctgccatagaggtagttgtggtggtacctacatttaatgccaggactcatcattaagagatagaaggatctctgttagtttaaggccacactgactacacaaattcaccaatgcctaaaacaaagagctcacatgaaggagatctcagcatctagaatcacatgccttaaataacagagctatggaggtagagacaggagcgatatgactgggcatagaaaggaataaaaggcagaaggggacaggaactgagagcttttttgcctctgaggattcatggagacatgattgccatttcagccaggttcttggctgctttgcttctctgatcttcagctggatgcttgaaccccagtataagtctcagagtcatctatttttcatgttacatatacatatgtgtgtgtgtgtgtgtgtgtgtgtgtgtgtttgtttagaatatagttgcctccataaattggaaaaatgtccaatttcctggatccaaagaaacaagttgttgtaagaaacctaatgtgggttcaaagtcccaaactcttgtccactgaaggaatatcaagcattcttaatcactgaaccatctctctagctctgtgatcattccattcttctcaccaatatttctctactgatgtcaccatccctctgttcctatcatctttgtctctatatacacacactcctagcatcattgtttactattttccacaatgtatgttggatggaattaattacctgtcttgtagttttctagagtgtttactgaatctctatgaatgggtttatttttacatgtgtatagaatcccttgatctattccttgtgtttcttgaatatttttaaacaggtctattggcttctacttaattttttctgtacatactttcatgcgagtcttgtcatctttaggggaaaagaatggataaaggaagaccagtttgggaatgcagcatatagattgtaaggacaaggtggattggaaaagtcatagactagtcagcaaatcagtaaatttctaagaatgatacccttagctcctaatttgaataaactggaaaaaaagggaaaatgagaaatatttgaagggattgataggaaaaatagctttggtacctgcctgaccaagaagaaagtgatgactcagtcaaagataaatcttggctttaatccttgctgcttgagactggtgccatttacagaatattgctttgattaacattagaagcagggagcactttgggatttcaatgttgctcttaatttatagaaaatttgtttatgaaaacaatccccatgagccacagaaagctgcaaagtgttcagatatgctttgcagtattttctctcacttttgattcttcaataatagggcctctgctacattgtttcatctttgtgtcctgactgacaactaaaaattaagctttttgtatatccaggcagtctgggaagagcagttgttctttgattatgcagtttcttttagtttgcaattttaatcataagggactctcattacacattctggatccttcatcagagagtcctcattttatatatgaggactctcatttcttcaaccttttgttcatatacatgaacacatttgacacataaataatgtgggaaagttgtcatttgccttgaagagtcctatcctctgtttcaagcatatttatgtcaagtgtcctccaaaactccctatgctgtgtcagactgatacaagctctataccagggagaaaggagaacagcaaacacttaaggatgtggaaaacattgccttctcaagaacccctagaatatatattgtttaaaatggaggtaacaattgtttattttactgtattaagatacctggggagggacttataagctggaagctcattcatccagaaagctctctggtcttcctgatactcttattttggggacttcaacatggctatttcaggatggcttcctttaagtttctataggcagatgcaagcatctaatctgatattattgcctaggatgctctgtcaggtaggctgttccagccctctctgcttgatgctgtaagtgtgtggttggttgctagttatcttctgcctctctctgcttgttgctatttgtgcttttactgtgtcttgctgagttcttaatgaattcactcattgatggctatgatgacccattctccacataaaacaccattaagagtctttttttcttacaaattgacataagagaaatggagacatattttttctcatcatagaatctatatacatttctatatgatataaatataagtgtatttcgtggtttaattaaaatacaagcataaatgtctatttgtaacttaattgaaatcaatattcatatttcctttggtacaaaacaggttttaaaatcagattcaagtaaatcttatgtgccatgtctattgaattgtgggagctatatagttatcttagtatgatcatcttagaacaaagctagagctggattccatttccttcctcaattccattccagaattgttagagtttacttattgaaaagagggcactaggcaggattgtgggcaatattcccaggctgtctctccttccagagtaaagcttcctctggctccacttcagagcaattaagccctcaaaaaaaaaccaacataacagtaacaatacgaggccaaaagaatggatgtgtactttaatatgtccctcatcagaaagtcagatgaataaaagaggaaatccaagatgtggtaataaaggaaacatgaaaatacctataaatacctatttaatatctataagcacctacttaatttatttgtagctaacatgctgcaatgtctgatattccctgattgaattccatctaattcacatataattctagaaacttgtgcccagaaaaaatcacaagtaacttattgagataacagatatatttctatttatgttctagatcttggaaaagataaggaatctctcccatcatctgcagccttccacttccccttctgtcctttgctctctctgattctgatgggccttgagactgaaaggaagaaacctcttttcctcttagaggtggaaattcaagtgtcaagtgattcatccttcaccctgagaaaacaatcacattccataattcatactgatagataatgtttaacatttgagtaaaactaaacatatgaatgtatacttctcgtgaagatatctttgtagaactcattcattgatttttacataaaataaacctgaaaaagaaagattttcattatattgctgagatgcttcaatgctcatgagaataaaaataaatcagctatggcaatactctttgtaaaccagatgaagtcagcaagggcactgctatattaaaggatcctaaaaggaaatataaagtctccttcatgtttaccctcatagagataaatagttgtgcagaggagtgtacctcagaaatgtctatatcatttataaaacactcatgataaagtctctctttggttcacagtattatttaaatataattttatagctgaagagtggcatctgcaaacataaattaagtcattgtgatgatattttgtttatgatctaaaaaataaagcttgtctggagatcacaatgcaaagctacccatactagttatccatagaggccagggagtggtagcacacacctttaaaccgagcagccacactagttaggcacaaaggccagacagtcatggagacagaagcagagggatctctgttcaaggccaccatgggctacagaagactgaatctgtctaaaagggcaacaaagctcatataaaggtgataccagtaccttaatcccagcactaaggaggtagagacaggagtgataatggctgggttaagtgaggaacattaggcaggaggagacaagagagagatgcagtctgaggaacagtgcagtctaggcactctgaggaacagtgcagtctaaggaagagtagagtctaagcagtctgaagagcagtgcagtctgaggcagtcagtctgaggatgcagtcaggggctgccagtctagtgatacactctgaagatgcaattggaggacaggatcacccctttggtctgagctttagtagagataagaacactctagtggtcagccactttgcttctctgatcttcagcattaaccttgataggtgactcagattttattaagaaaaattagaattcattttctttcaaagtgttatttagagaaaaataatcttgattttacctatcaaaagtctgaagagcagcatgtttgcacatcacaggttcactgaaggagggagtattcactttttccccagttaaagaatattcaaaattttaggaaccaacctaactacataattgtaacttggtctacaacactgtcatattggcagttgtaattataccttaatattcattgatgaagaacagattttatcaggaagggctcatcacatcccattactgattttgtactgtatcttaggatgaacttaaaaacacagtgggttgatttctgaagcactagtgggtcaatggtaatttattttgtggatgattatgcatccattgtcaacggtgttagtttgacacaaatctgccttgattggaagggctctctattaaactttacaagcatcttattatttgggtagttactatttattagtggaaatatcatttcattaaatattttcaagtgatggcaaggatgcacaactcttcacttaattactgtcttaacctgtatcaattaacacagaagtgaagatagagatttatgttaataatatttatttttcctttttagcaatttttaaaatgagtaccaaatgtataaatgagggaaagtaggatggtaagaggaaggctatggtttgaggtagaggctgaacttgggcttgcctggagctctggagctcaaattgaaccatggagttctcctgttcagtggctagtgggttgtttgcatttatcccaaacctgttcagccattgacatccaatgcctttgatgcctacctttacaatctaaagactaatgatggcatcattttgtgcaagtgtaacattttagaaaatatgacatatatgaatcaagagccaaagtactcacagcctctggcaatgggcacaaagcaaataagaggatagcctccagtcactcctgaatcgaatagcaattgattatgtttttattccccaagggaaattttcacatttcactttattttcctaaagtaattctgctttttactgaactgatgtttgattatcctgtttacacatccttattatgatgaagtgggctgtgaatgttcctcaaggacccagacacacagaagagcaaatagaggtttgatcttcagcttgtagcactaagaggacttggtaaaatcccctgggttggagcttagtttgaaagagatgcagttagtaggaagggcttagtaagaaggcagttagaccattttagacatgccattgaatggggtgcaggtgctttgccttttggcttctttggctttgcttccaaggctgaatgaaacaaacagattgtccctgctatgggcacctgtttatgaagcactgaacgagccagaggcactacaataccagccttaaagtgaaacctctgacatggtgacttacacaaagcaaaccttcactctcttttggctgatgatctcaagaagaaatctgacattcacaactatttttgtctgagaaacacattgaaaggatgtggttagtaaatatattttccattttatttgtatattttaattatcgatgacagtggattcattaggacacattcatgggagcatatgatgtatgctgagaatatatactccacattccctttcttgtcctccttccacactttctcctcccaaacagagtccttctactcccagttttttcctatatgcagagaagtaatttccctgttttccccgccatgagaattcagcaaagcacagcagtgatagattgatattgattactacaaaattatagagcgttcaggaagcagatgttttgtttagatttatcaaagcaagacataaatagatcccaatgaaggtcactcttttgtgtcaagagcaaaaactgtttatttcatcctatgacttctagaaatgctaacatgttataaatattcagatagttttggcaggttggttaacctggattagactgatactgcctctgaaacgcggttacttttattttgggtggttcccacttcttccattttcaatagataaaccttctctttgcctcattctaagacacccttgcccatttgcagataaagagaatctttctgaaaagaaactctctcctggtcttatacacatgccaggaacctacactgctgctaggtttgactgttttgtcactggtactgctctgaaacaacagacaccagggtaatatgtgtatgcaattacatccatgtacagctcagaattctcccaaatgcaggcttttgcttacttcagaagaaatctgtttttctctgtgttgctctccgtttctgcccatgtgtgtgttgtatatgggaatgtaagtgttcacgtgtatggatgtgagcacacatgtgtgttcatatgtgcataggccataggttgagtcaagtgacttcctctgtgttctccttatttgtgagtaagagtcactcacttgacttgcatctcactgattcaacaagactacttggccagagaacctaagtgatattgtctcaacctactcaggtttaggattaccagtgtgtagcactatgtcttgctcattttacatgtttgttaggcatccaaactcaggtcctcctacttatatggcaagtgttttacagactaagccatctctatgggtcccacagaataaactgataagtttgtttttgttttcctctacctgtgactatttacaatgtaacatgaataaagaaaagacccagaatctgatatttgggttcaagcttcaagctgaagaccagaaaatcaaagcagctgggcactagatcacattctacctcagactaaaatggctgatccaggagctctcccaaacctcagaatgaagcctctccccagtgtggctagagaatcctgagacttcaatgtcttcctatcctcaatgtggctggaggatttacacttgatagtgaatactgaagaccctttttctatctttatttgcctcgagtgctggaattacaggcatgtgttcctaggtgctgagatcatctttgtgtgagcactttatctttaggactcaatcaatcttgtgtagatctgggtggcttaggactcagagagctctgtttacctcttaatcctgagtcctagggcattaaaggtatataccatcacttcctagtttctagctactgagattaaaggtgtatatcatcactgcctgatctttatagatgaaagctgactttcctttttgaatcctcaggcaagatttaataaattatacataatatatcaccacattacaatagtgtgttatatccataatcagagtagtactggcaatactagcagtctctaccatgtaacaactatatgacaaataactactagcatactatttactggatcaatctttaaaagccataatctgtttcagggcaatatatggtggtttacactaatgatccttaacaggagtgggttaaaaatcatttgacatccttctgaggtagttttgatcattattgtaacagtggagtgagtactatggccatctagtgagttgaccctaagcctgctgatgggattcttgtgactcatataacagtccttgtggcaaatgatgatcagatctgaaatttcagtagtgaaaattttcagaaccttgagtttaaattaaggcttcgtgaccataatttaatagtggcataaaattgatttgttcttaaatagcttctttctgttattaaaaagagacatcccttactgggtatgatgatgcatgcttgcaaccctgacactacagacattgaagcagaatgttcaggtcaacctggttaaataataaacaggaatttagcctaggccacaaaaggttaccatggaaacactggtccactgcactctgcctctctattgtcctattcaaataaacacagccaaaggcaacataattaatgtaaaatgtatctgtaagaatcaaaatgattgcatttgctgaaacaggctctatactttcaaacatagtttctgtattagttgcacagtgtccatcctcttgtattaatgtaatagaacccaagaatatagctttttctgtatccttgatttttttcactcaatctgtctgtctgcctatctatcatctgtctatctatctatctgtccgtctatctatctatctacctatcatttatctatgtacctccaactatcatctatttatcatcaatggttatctatctacatcattgcatgcatctcgtcagtattgttttttccatatgtcggtttcagacttctagaacccaatcccattgattcaatgcctgacctcattcagtaaaattctcctctgcagtaggtcaagattgtgttgtaatgctcagtgtaaaggatggatccccacattattaattaatttcatttaacttcctgattggctgaacagtcactaattaggagaagaacttggtaaagtgcattattttctatgactaaatcaatcatgctaacttctaaaaagctagaccatgtgccccttaaatcaatgttctaatttatttttcttttatatttaaatttgtaacaggattgttttacatgtcagtcacatttccttctccctctcctcctcccttgccccctaccaactaacacccataacccaaaacctttctgctccccagggagtgtgaggccttccatagcggtcttcacaatttgtcatatcatttgggatagggtctaggcccttcgaaatgtgtctaggctcagggagtatccctctatttggaatgggctcccaaagtccattcctatgctatggataagtactgatatactacaagagttcccatagatttctgaggcctcctcaatgacacccacattcatggggtctggattagtcccatgctggtatcccagctataggtctggggaccaagagctcccccttgttcaggtcagctgttttctgtgggtttcatcagcctggtcttgactcctctgatcatcactcctccttctctgcaactggattccagttcagttcaaggtttagatgtgggtgtctgcttttacttccatcagctgctggatgaagggtataggatggcatataagttagtcataaatctcattatcaggggagggcatttaaggtagcatctcctctgttcttagattgctagttggtgtcatctttgtagatctctagaccttcccctagtgcctgatttctccttaaaactataatgtctccctctattatggtatctcttatcttgctcttttttcttcccccaactcaaccttcctgctccctcatgtcctcctcactcttcctcttctccccttctcattctcctagctccctctccgccccccatgtcccaatatgctcaagagatcctgtccctttccctttctccaagggatcatgtttgtttttcttaggatcctccttgtttcctagcttctctggtggtgtggattgtaggctggtaatggtttgctatatgtctaaaatccgtatatgagtgagtacatagcatttttgtctttttgtgactgggttacctcacttagaattgtttcttctagttctatccatttccctgggaatttcaagattccattttttccccactgagtagtactccattattgtgtaaatgtaccacattttctctatccattctttagttgaaaggcatctaggttgcttccagtttctggctactacaaataatgctgctatgaacattgttgaatagatgtccttgttgtatgaatgtgcttcttttgggtatatacctaagagtggaatttctgggtcttgtggtagactgattcccattttcctgaggaatcctcatactgatttccaaagtggctgtatgagttggcactaacatcagcaatggaggagtgttcccctttctccacatcctctccagcataaattatcattgctgttttttttttattttagacactctgacaggaataagatcgtatttttatttacttttaaatctgagcatctatttaatttaatatttagaaaatgaaagttgtcacaaaccacatttgtaatttggctgatgcaaaagttgagtttattctgtgtttgtgttcactgaaatgaatgaatcaattttgttttcaacaacagcacagtgatgtagaaatcaggtctgagggcttagctgggaagccacaaccattccaaccatccagggttaattcctgaatagacttgtttttgatatcttatttgcataagcaacaatcctattcttactcaaggagcagcaaaaagtaattagtgcttttgacacatgcttcttggactccttgttcctcttcttctccttttgatttcaaatctgctaaagaaaacaaaactgctcaaacaaaaggcagctggcagaagcagtgtcttaaatattcaggagaggagctaagcatattgttttctctgtccattcatggtttgcttttatagcagcaacaccactgaaaatatgaaggtaaatcattgtagataatatttattaacatccagcctcatcttccatgtaagccacacagtcagatggacaaggagctcacttatctgctttctttcttatatttccccgatccatttctatgggaagaacaaggaatctgcaccactgaggagctgtagtgagttctttggcaagggcccttctttcacagctcaggaaagtagatgctgaaaactgtcaaagactcacaagggcagagtgtgcagagagttagagatcttggaataatcagccttcagtgggatgtctccatcaaatctcttcccccagagctcaaggatttctgtagaagaggaagtggcaatattgtaagatgtagtagggagagaagaaatgaaagaactagggtcttctagatacaagagaactgacccacatctaaactgacagagactttgacagcattcacaaagtaatactggtaaagtctaagctagatggtgtcccagtgctgagagaggaagcagacacaagctgccatccctaaccctgaagctatctacaaatgacaacttttcataaacaaacaagtcgttttcttcaagggagtttcactagatatacaaactgctcttaaaggtgggctccatgcccaggaatagatgttgaactaaaaaagaactcaatggtattttgggaggttgtctcaaaatgctttgtctgggctttcttccttacaggtcttgcttctgattttgtgtttttatgggatttctatgtgtgcaaatgtctgtgtctctgtgactgtttcttgggctctttttttttaatcagtttgttttatcctattctgtttatttttgttgtttttgcctgtttcttttctaatgagaggaaaacgaatgtggatttgggtaagtaggaagatagagaggatttgcgatgtgttgaggtgggttaaatctattatcgaatttattatataaaaatatattttaaataaactgacaataagaagaaaaacaaaagtttaagataagacataacataaccatttaagggacacataataagggaaatctatgacatatttcagaatattctattatttgtttatacttttaaaaatagaaaatttcaaaaatagatttatatacaatttttaaagttcccaaagtaatacagacactgccatgtagctctgccagcattcttaaccactcagctttatttccaggcttgactttgttaaaaatatgtttcctctattttctctcttctgtcctcctgccacattagttattcacattttaaactatctgatgttgtcctgcacactagggagcctcttttatgttttaagcttttcattctataatgttccatgctggaatttggctatttcttttatgtggtttttatttgaaggctaaattgtttcacctctcaagaaaaaatgagtccatttatttgctgcttttaatcaaatagttaatagtttgaacatctacatttactaattcccatatcttaatatcttacttgttcttaaagagacactgcttttacagttttactttagttctactaagtgtgtgtgtgtgtgtgtgtgtgtgtgtgtgtgtgtgtgtgtgtgtgagagacagacaaagagagacagaaagagagagaatttaggcacatttgtgccaagacaccctcatgaaagttagagaagagcttttgggatttgattatctctttctacactgggtttgaagctaatgttgtaagtcccttctttccctcacaggctatagctatatctattctaagccatttgaatctcaaatatagtgaactgtgtgttagccatactggcttctctttcaagcctttattcaacatgaatgtaggtgttactgttttagtacatacctgatttctcagtactgcagactaaacagactgaaaataattctctgtattcattgggccttctgatccttgaaatcagctccaagccaatgagttacatagctacaaggaaccctggagggccttgctaactgaatcttttatttctgatgtttccctttatattttgagaagctatagagtcagaatcttccctttaacttttcaatcctcagttttatttccatgcatctgaatctgaaccactttgtcactgttagtggcttgttttcagttgaaaaccagaagacttgtcaacttaacttgtgcctctatcttttcagctggctcccattcttattgtgcctgccccaaccatattgtcaaaccttctgtataacatatgtagtaaatttccttttcatgataattttagttagctctgacttttcatagacttcactatagtgagcattctttagcataagctggtgaaaggccaacattagtccctgtaggagaaatacttggtagaatctttgaggcaaaaaatatcctgctttctaaagactttttaaaattgaagctgttcagacttgtgtttttcatgaatgtttagcattgaaagattctggtatgaggacttgctgctctgtggtgtgtggtagcacatagctcaatgctttgaataacaaggcaacagcacatgtcttccaggacaaattctctccaggaattcttatgaaaatataacattatcagcttatgttttactgatggggtactcccaagcagaccatttatgacattttagaataaaagcatcattcctctggtttatcctatgtactaaatgtgagcctgagcatgagatatgctttctgatacctttgtcctcagaggtccactttgtcttgataagtgtcagcataaaagagtgccacagctatgacagatttcactcactattcttgaacatgcaactatttgctctctgtttttaaaaatagccagtacaaaaagaaaagaaagattcaaaatcataatctcctacacaatatggttattttatcaagccaatttaattatttttaatttaaattttcctttgaaaacaatattggcattccccatgcttttctgcctgagaattggaaataacctactctattacttactagtgcttttagaacatactatgaactaaaaatgatatttatataaatgttagtcaattgaatatagaatatttaatgttgaaggcaagcaaatgcttcttttgtactgtatttaaaaggcaacttggttaagaaacatctgtaataggatctgatgccctcttctgacatacaggcatatgtgcagacacagcacgcatatctacacatcctgttttacatagatagatacaaatcgctagaaaattgtgaaactttcttgtcaatagacatcataacagccgtgagtcaaagatacttgttatttctgaggtgatttctagttaaagttacttgtttagataaatgctaaagaactttattaagatgaaattatcataatgagaaagtacactgtccttctttgagtggattttgagagtttaacacatctgttgcatttttagacatcctacaacattcccttagaattacccatctcataatccacatgattagctttctcagtcatcaacacacctatttcctatttcaaagttggaagtttaccctacaatttcagacttgttactatgcatttataagaacaggtaacaaagcatccttattttttgaagaacataatcccaaaaatgagtatatgattaaagaatgtagaaattctccaaaatttctttctttgccacaaaacattgcctcccgtaaatgtgcatgtgacccgcatcaggtttcatgttcaattgatgaactatatgatctctttggttggtattaactaacttctttgggtaagcacaaaattacccccaaaatctttgccaatcttcttacaccctgaaagtcactttctgagcaacagctaccatatcctaaagtctcaggtttgatgtatacttcaagacactatcaagcatgtttcattcatgaagaacattacctctgtctcttactaacactttgaaatagaaaacactcaaatgcttttgttgtcactcatgtgaaagtgacacaggattcacagaaattagaggtgtccagaaaacaggcctgtcctaaatacaaccaagtatagaatctgttctttagggtgtaaatattccaagagtttgattttacatattagagagagtatgagaatgatgaaggacattttgatgggcgattaaccatgattgttcagcaaaaggtacatagtagaggaggattcctttcatgtgccaaaacatagcaggagtgcaaatcatgacctgaatggattgacagttcagagcggagctctgatcaaatctgacattttccttttttgtctcaacattgagattaagggacataattctctaggagtagattaatgatttagtactcagagagacattttctttacaatcatcaccactatcatcctaaaaactgacattgtggttaatttcccaagcacttcactgccacaggtgacaagtggcctcttacattcttgaactcttctgtgttcaaacatcaatgaggcttgacataactttccatgttttttttcttcttttctttttttttcttttttttttttttttttggttttctgagacagggtttttctgaatagtaaaggggccgatcctggccctcgctctggagcaggctggcttcaaactcacagagatctgtctgcctctgcctcccgagtactgggattaaaggcgtgcaccaccaacgcccagcttataacttttcatgtttaaagaattgagatttaaacttatgcgtaaggctccagcccatgatgtttctaaaatatgtcactaattctactctacctataattggcactgaaacaacttatctctactttttattattaatgtgaaatgcacttgattttaactattgaatggtgattccctattcttgaggaaaatcatgagctcatatcatttgattttttattgattttatgtgtatgagtggtttgtgtgcatttatgtatgtacaccacatgcttacctgtcacctgtgaagttcagaaaataatgtcttagcccctgaaatgaagtgtgtgctgacaagcaagcatgggtcttctgcaagatcaacaagtgctcttgaccacttaactatcagttcactcccaaggctgattaataaaagatatgtacttactgctaaatcagataaaaatacactactgtgcttctttgggtgggttaattaggctactttctttgtgatttcaaacttgcttctttaccaagatcttccttctgtgtattttatcctaaaatgatgttttctatatccatatttcatgatagaatcagaactggacctaagatggacatatacaatgtggtatttgttgtgaaacagtgagaatttacttactatgtggaaaacagcagggggaaattcacacaagcatgaaacttctacaaaccaaagaaaatatcaaggaaaaattcatcttgttaaagaattattttgagatgatggcccataataagctgcatatgatgactttattgtttgtgtgagatcatattcagagctgtccaccttttcatgtaaatcagcacgagcaataactcagtaacactgctgaaattcaactgtatctctcagtagcttgaggcctacagaagtctcaagcttcagtgtaaactttcaaacattattgtagagagagaagcctctgctagattttctcccaaccttccactctcttgctggcttgttcccttccttccttccttcttccctctcttctcttataataaccagagaattagaaatctgtgggatttgttttgaacaagagacatcccatttttctatcattggccaaagacaaatggtaaataaacttaatgtgagcctaacagtaatttaagggttcttgcttgttactgttaccttaagacccttgtcagctgtataacctgccaagtaattgaaataactgccttgaggccctattcatatttcaactgtgttgattagagcctgtgagttccaaacctgaaaggttttaaaaaatacatgttgagttgcaaaagcaaacttacaacattaatatttgatttaggatctatttataagtttaggacagaccataaaactttatttcgcatttttacagtcagcactgagaactagagagtttcatgtgtgaaattttctgtgctgtgtctccatctagtattgaagagcctctgaagtaataattttttatctgagtacctattgttaatattcaggcctgtccctggggttctgagagctgtagccactaagagtaccacctgtgcatattcactatgttcccttttaaaagggccccgcccacctcccattctcctttatctctctttctttctgtccctttctgtctatccccctctctctgcccctctttcctctctcctgttacttctgtccctggaggccagtctctcctctcttctttttatgatctctccccctaataaaaaatccccccctgcttgaaccctatcgcatggtgtctttctctgtcaagtggattttcttaaattacaacacctatgtaccagaattatctaaaatgttggttaatgtaatagttcttgtggtgacagttcttgtactctctcagagtcagaaagaaaattgcatctgaatttttgcatggatacttaattattttaaccacagattactgaacatacatggtttagcaaattcatgctgagatttcatcaattctgagtattatattaaattatcatattttggactatcatattttatattctgaaagattttctaatgtatctcagaacattcttactgtaggggcagtggaaactgacagaaggtctttattgaagaacggcctacctgtcatctctctagcaatgcttttttttttcctttagcaaagaaattttgtgtaaacataacacattttcctaatccattctttggttgaggaacatcaaagttgtttccagtttctaactattatgaataaagatgttatgaaaaaagtgtctttgtggtaggatagagcatctctgagtatatgcccaagagttgaaaagctgggtcttaggtagattgccattttctaaggaaccaccacattcatttccatagtggctgtgcaagtttgcactaccgcatacaatggcagagcatttccccttgctccacatggtcactagcatgagctgtcacttgtgtttttgatcttagcaattctggcaggtgtaagatggaatcttaaagcagttttagtttttgctaccctgagtgcagcaggatgttttgggctgccagtccccaaatcatgatacagtgattaattataaaagctcattatatagcttagggttttccaaccagctccttttttaaatttttattattgatatttttaattactcatatttacatatgcgtccccccattccctaaacctcccctcctcccatgttccccacccaacccaccccaacccaacatccgtctacactccagggatagtgaggccctctaccaaggaccttcaaagtctgtcatattgtttgggggggtctagaccctccatgctgtatctgggctgcagtagtatccttccatagggaatgggctcccaaagcccatttgtgcactagggataaagactggctccgctgtcagaggagccatagactgtcttgggctcctagctggtaccatattcagaggatttggtttgctccaatgctgcttccccagatttatgactaggatctccattctatcagtaggtcagggccactgtttctgcagatctctccatctctgtcttggctccttgcctcaacccttttccccctcaacaattgaattccagtagtatgattcagtgcttagctatgggtatctgtttctgcttcaaacagcaactggatgatgtctctccttcctcttcctgcccccgggctccaatttggtcagaggttcttatccccatccccttcatcgaagggctatgcaatcttctcttgtggtcctctttgtttcctagctgtttgggcagtgtggaatgtaggctagtgatcctttgttctacatctaaaaatcaaaaatgagtgagtaaaaaccatgtttatctttttgtatttgggttacctcagtgaggatggtttcttctagttccatccatttgcctttgaatttcaaaattccattgttttattttttttccgctgagtagtactccattggtaaatataccacattttctctatccattgagaaatggatctatcctcttcagttgaggggcatctaggttgtttccaagttctggctattacaaataaggctgctatgaacacggatcaacatatgtccttgttgtatgaaagtacgttatttgggtatatgcccaagagagggattgctggatcttgaggtagactgattcccattttcctgagaaactaccacactgctttccaacgtggccatgcaagtttgcactcccaccagaatggaggagagttcctctttgtccacatcctctccagcgtagattttcattggtgctattgattttagacatagtgacaggagtaagattgtatctcagtgtggtttgagttccatttccctgatggctaaggatgttgagcacttactcaattgtcattcagccattttggattctctgttgagaattctctatttagttctgtattccatcttttaattgcattgtttggtggctagtttcttgagttctttgtatattttggtgattagcgctctgtcagatgtggggttggtaaatatcttttcccattctgtgggctggggttttctcttgctgactgtgtcctttgctttacagaagcttctcagtttcaggaggtcccatttattaattgtcgatctcaatgtttaagctactggtgttatgtttagaaagctgtctcctgtaccgatttgttcaagggtgccacctacattctcttctagtaggttcagtgtggctgaaattatgttgagggatttgattcatttggatttaagtttagtacatggtgatagatatggatcaatctgcaatcttcttcatgtttgagttcagttatgcccgcaccatttgttgaagatgctttgtttttccattgtataaatttagcttctttatccaaaaaaacaggtgttcaaaggtatgtgggttaatatcagggttttcaatttgattcctttggtcaacctatttatttttgtgtcaatagcaagctgttttcaggactatggctctataatttaacttgaagtcagggatggtgatgccaccagaattttctctattttacagggttgttttggctatcctgggatttttgtttttccatatgaagttgagtactgttatttcaaggtctgtgaagaattgtgttgggattttgatgggaattgcattgaatctgtagattgcttttggcaagattgtcatttgtagtatgttgatcctacctatccaagagcatgggagatctttccattttctggtatattctttaatttctttctttaaagattcaaagttcttactaaacaggtctttctcatttttggttagtgttatcccaagatattttattttgttagttcctattataaagggtgatatttctgatttctttctcagcacatttatcttctgtatatcgtagggctacagattttttttgagttaatcttgtatactgccactttgctgaaggtgtttatcagctgtaggagttccctggtagagtttttcgggttacttatgtagactatcatatcatctgcaaatagtgaaagcttaacttcttcctttccaatttgtttccccttgatctccttttcttgtcttattgctctagctaggacttcaagtacaatattgaagagatatggagagagaggacagccttgtcttgttcctgattttagaggaattgctttgagtttctctccatttagtttgatgttgtctgtttgtttgctctatgttacttttatcatgtttaggtatgttcctattaatcctgatctctccaagacctttatcatgaagagatattggattttgttaaaggctttttcagcatctagtgagattaccatgtattttttctttttcagtttgtttatatgatggattacattgatggatatttttatgttgaacagcccctgcattcctgggataaagccaacttaatcatgatggatgatttctctgatgtggttttggattagatttgccagtattttttgaatattttcatgtcgatgttcatgatgcatattggtctgtaattctcttttatcgttttgtctttgtgttgcttgggtaccaaggtaattgtagattcataaaaagagcttggcaatctcccttctgctgctatcatgtggaacaatttgaggagtactggtattagctctctttgaatttctggtagaattctgcagtgaaaacatctgggcctgggatttttttggttggtagatttttgatgactgcttctttttcattagggtttataggtctgtttaacttgcttatctgttcttgattcaattttggtaagtgatatctatcaagaaaattgtccatttcctttagatttttgaatcccggggagtacagtttttcaaagtatgaactgatgattctctggatttcttcagcgtccattgtcatgtcccctttgatatgtaagcaggggttcatgggggaggttgggtggctgagcaaagcccagactcaccggaggttctggtgccacccagaggacagagggaggagtgtggaccccaactacctcttataatttaaattaaccaatttctatgcatctaggtgttaccatgtgatttgtgtttttacccctcttcctgaaacttactccctctacatctggctagcaactccatctttctcttctgagagttccgtgtccccagaagtcccacctaacttcttcctgcctcgttattggccattcagctttttattaaaccaattacagtgacacatcttcacacagtgtaaaggaatattccacagcacctaatggataaggatgccgatcatttcatgtgtttcttagccatttgagattactctgtattgaattctcattttagatatgtactcaataaagaatagaaaaagaaaatgtggcacatttacacaatggaatattactcagctgttcaaaactggcatcatgaaattttcaaatggctgaaacttgaaaacaccatccttaatgaggtagcccagaccctgacagacaaacatggtgtgtactcacttataaatatatattagctgttaagtaaagaaaaatcatgctacaatccaaagacctagagaggctaagtaacatggaagcttcaatgccacatacatggatctccctgggaaggggaaataaagtactagtgactgatccaacttgagacccataccatgagaaacagctcatgcttggctctgcctggatggccacgaaccagaaacaggtcatcgcaggggcccaagatataattaaatacaattggccaataaaaatgttaatgaaattattgcttatgatattctgctatacacatagattgttgcccagcacaattgtcatcagaaaagtttcagccggtaactgataggagcagaggtagagaccaacagccagacaattggcatatccataggaaaccttcagtataaacggaggaagtttgtaggagtcagagggttggaggaaactatgagagcatgggccacagaatctactaagaagggatcaaaggaactcacagagactgaaattgacaaacacataccctgtatgtgtgcgtgagcttcatatgccttatgtatgtgtagcttggtgtttttgtcagactcccaagagtgggaatatgtatgggggctctctctgactcttaagcttgtgcctaggactcttttacttctactggttttccttgtccttctttgatatgaaggttgtgacgagtctttttgcaaattgttaggcgatgttcagtggatatcccttggagtcctgctcactgtgtttggaacctagaagacaaccttcaaaatcattccatttgttttgatacagtctttccttttcctgaaatttagcaaatagtctccatagactgcccttgaggtgtaggatcaattgtctctgcctcctcagtgctaggattacaagatggagttgccactcctgggtttgtttatgagttctaagaatcaaatcatgtcatttttcttgcaagggaaacacttcagtgattcaactctctctctggttctctctctgtctcagtacatacgattttgggtttatgtgtatgaatttttgtatgcatgtatacgtgtgtacccttgtgtacttggtatctgaggagggctgaagaggtcatcagaatcccgggactagagtaacataaatttgtgagccacaatcgcatggaatcacattcagatactgtacaaaaatgttagtattcttaacctcctaaccatgtctccagtcccaaagaacaatgcattgtctttttctataatatctatgcttatttaattttgcagtataatgctcaactattgcatttaattatattactataagataatatttgcagagcactttttggatataattattttgttatttaccacatgatatataattcttttattatttaccactctgagcattttgaaatgaatattgagtatgagttaataatttatactgctctgtcttttttccctgaaatcaattttctatataagcatcagtaaaatatactgatgtcttcaaaactgcctatgtaacttacagaaatgttatttctcttcccctttgttgagtatagcatttggaaatgtttattcacttaattaattttttatttatctgtatgtggatgtttggctttcatgtatgcctttgaacttcatgtgttccttagtcttcaaagactagaaaaggctgccagataccctgaacctacaactcaaggacagttgtaagctgccatgttggtgctgggaaccaaaactgtttttattggaagagatgcagatactcttaactgctgagttgtctgtccagttcctaaacttacattttatttggataatcaacaataccaatggcaagtttgaagtacattattattattattattattattattattattattattattactttgtgtaatttaaagaaacatattgtggtttgaaagatgactaaggggttaaaaccatgcactgttcttccagagtagcagaggttgattcctggtacccacctcaggcagcacatgaccatttgtaactacagataaatgaggaattgatgcctctggcctctgtggacacctgctcaattatgcaaacactcaaccacagacaaatgcacataacacctaatttaaaattatgtataaagaaacatatgtacactttcatacactggcatatggcagagtgaagagttgctcttatgagcaaaggattccagcatggaattcacaccaaaactgtatggatatgctatgctgagaaattcattacagatatacaattaattaaagaagaactgaggaatataatttatcatgtgaacaaatgtagatttgaaactttcattgaaacttgttggtaactggtgattagcattgggtacatatgaaggagaaaattgtaaatacaacagaaatcattcatgtaatttatatgctgcttgattatattcacaaactgtaattaggtttatgataaattttataagttacgtattttatacatagattattagaaaatatccatataatcatttctagcattatattgtttacagctatagctttatccactttttgctcattttaatgtgttcctcttttcaattaaaatttcaatgagtagctatgtgattatatatttttatttctcatttgctattttctagggaaatcatttacatatgtggttatcgataggaaagtagccacatgtactaaattcttaatgttggcattttgatattcaggaagacaaataatatttgagattctccacagaacaaaattatacattaaaaagtgatttttccttaacacacatatataagagcaacacttatgggccatagtaggttagagagatatatgtgtttgtgtgtatgtgtgtgtacatgtgtacatctgtaacattattaattatagagggagtcatgagcaaggaaggagttggataggggagaaggaagagtaaaactggcatcaataagacagttttcaccacagggagttttcaaaaaatattttaaaacaaaggtctcaaagaggtgatttatttgttctcaattacaataataatggattcttaggaattttaataagtatttaaaatacaggaaatgtgtctactatcctctagaaattcatagttgaacatagaaaacttcctatagatcaaataatgtgcagataatgaggcaaatcttacaacacatgactgaatgaagaacattaaagacataaagagatgcacattgcaggactttgacattatcttgctcattctccatttctgaactgcaacagcaagtacttttacacattttttaatattccaaagccctgtgttttattgcttgcttaatacaaagggtgttctacccattgattattaagaaaagaccttataactgcttccaaattactttgttagactgacctcactcagtacttctatttatgtactcctatttcgcaatgtccgaagtactatttcaaggacaaacaagtaacacattctggtcatatgaataaagaatgcaaatgaatgaacaggggcaagagaatcttgaaatggttatgaaacttcttatattttaacttgaatttcattatgagttttgttatatatctctaccatcacttaatacttcaatattgattactcctttgattcaagaacaaaggggtatacattgctaccacctctttgcagttaatttgatattttattttattttgtttcatgtgtgatgtgcacgtacacattcaggtgtatattaaagccagagttagtatcttcttacacacatttttatttaccaagactgtgtctcttcctaaacctgggcctttgaattatggtcacatctgggattccctatttccacctttcaattgtggataatacaattgagccctcatacctatccagcattcacatggattcttggaatctgaacccaggtgttcatgcttgcatagaaagcactttatatctaagcccccctttttctaaactcaaacaaatagcatgcatagcaatgtaacaataaatcttttcaacaagccgctagagccccacagccatacagagaccagaataacacaagagacttatattaattacaatgtggatgtccaatgactaggatttcttatctgctgctctgtcctaagcatcaaccataattattaatctatatagtttataaagacttatctgatcgagaacaccagtgacacacatcctctcttgccaggctcacatcgagtcaccacctctactacattttccagaaacctcttcaactcctagttccacctatcttgcttttctattggccaacagtgctttagtcatcaaccaataaggaaaacatatacacttaacaacatcccccatcacagcgtctgtggatattttgttctatatttctcagtactaaatgatgtggtttttcagtaaatagtggttgagcacagagtagacagaaagttgcacataacaaaattatcactctgtagaattcttgttctgtctaattttttaaagagttgataatgattgctccttgataaatatactaagatacattcagcaatagttttagaaatcatacagattggtaatgaatgcccaagtattttgagaaagattattgtgtatggtatttgtcataaatatgatatatgatatgtctatgtctaagttagggtttctattgttatgaagagacaccatgaccagtacaactcctacaaaagaaagcatttaattttggctggcttacagttcagaggattagtccattttcatcatggcaggaaacatggtggcatgcaggcagacattgtgctgcagaaataactgagaattctatatctggattgccaggcagcaagaagatagagtgacactgagcatgacttgagtttttgagaacttaaatccacccacacatctattccaacaaggtcaagtctaatagcaccactccctatggacccatggggaccgtttcatttaaaccaacacaatgcatatgtattttcaagtaactatcagattcctgatcaaaaagactgcaacagggatataatgtagagcattatcacaaaagtttcttgtattaccattttatgcctgcatcatctgcattcatctcaactttatcaataactaatgtatttgttgtttctaatattttatttcaataaaaatataaatattcagagtacaactttaagtattaattcttcatattcagcttaattgttgatggtttatttggattgctgtgtgtatcagtagctcaatttctttttcttgacaaggaatacccttctgaaggatatagtgaagttgtgtaagccctgtctatgaatgacatttagatttttacaaataaagctattaagaattcctgtttgtgtgcagactatgacatgatcacactttcaattctgtggagtaaaatgtagaaaataagattacatgtttgtatggaagacaaatatattttaaattatttttgtatgttcagaaactaaacataatcataccaccccactttcttgccctccagtcaaactttcccatttaatccatcttttctccttcaaattcatgattttgttatacattaatattttatatatgttagggatgtattatgtatttttcttttcatggacagcttatgaaagatccagttccttcatatgctcaccagtattcagcctttattttatattaataaatgtgctatgaaaattcatggttttttaaatgtacttccttacaggcaaaaacatataaaatattttattatgctaagtttttgtgttatttttcagcgttatttatctttgtgtttttttttttcctgtttcctaatatgagtactgagtgttggatttcttgagcagcttcactgttatggtatgtgtacaggagttatacagatgatagcagttataacaataaaaataaaacttaaaagaccctaagtaaccccctgaaaaacatttaattatcttcatgctgcatgattagtaggaatacattgaattgactcatttagatagactagtatgagaaagggttatatatgaccatattataaatatgcataagtttattttgatttggcacacataaatattctattatgcattagttactttcagatgcattgacaggataattaaaaaagaaactagacaaaagaagtacaatttggttcatagtttgagattataaagcatgggttgatgggaaaaagcatggtggcagaagtgtgaggtggctgatggcattacatcattagtcaggaaaccaggaaaaagagataatgattcttagcttatggtcaccctttactcacttgtcttgtctatctcttcaccttttatttattccctgaatcctagcctatgcattcactgacctttgtgctcctggtttcatctgccccacagagaccatagtattgcatacacttcattgttttggttgactagaagtaaacacaactgaaagaatacatgatacaatcagtaattaagttagctccaccacccacaaaaagtttatggaataataacagaaatcctaaatccagcattggtatgcaatagtacatgatatttgctagacttcaggaagatgaacacagtctgagtcatgctgagtcttccaacttatgttaagcatttctaaaaacaccttcatgatagggaatgtcttctgtatatatgtttgtttcattggttgatgcataaaacactgttggccaatatggcagcaagataggtgggaccaggatatgaggaggattctgaggtgtaggcagagaggagttatcatgtgatctcaggaagttacttagctgggcagaaactgccactagatggttagaggtctggaggtctttacagacaggaagtgatatagctgggcagaatcagaatataagcagggacaaacagatggagcctgtcactagctaaccatagaagactggaggtctttacagacaagcagaaagtgatatagctgggcagaatcagaatataagcagggacaaacaggaaattgcttatcttctctacataccactgagcagttgacatgtaggataccagagaagtaacaggtcccttgacttttctccggtaagagaagaccatatggaaatacttagattattataaatgggttaatttagacagaactatccagccaccagctaacagcttcatactaatatagcatctgtgggtttaatttgggcagggaaggttagagggacccagcagggccagaaaaatcagattacacctttacacaatgcccagaattgtatcatttagtcaagttaatacaaaactgaaccaccatcaccagtatagcatcttatataaactatgattatgataatgataaaagtaatacttctctcaagcaaagtttggcatgtataactttccattaattaataaggaaaatgtaatttaattaaccaagatcatgaattacttttttggaaacaggttctgtaaaccatttgtaactgaataggggttacaagaaaatgagtgatgcataagcatcaagatgtattggttgtgtattgattccttcaaggaactatgatggaatcttaaggagaaaacagaacactcctgttcacaattttaagctagtctattgttcattaatttaaatgattcttgtttttctcaaactggtaatattaatagtaagaaaattattcacaatatcataagcaagagaaacaattctgtacgcaagaagagagagtgagaatgctgacactgtgtgcctgctgggatcaaggatggaataaatgtcaaaaagactttggatttagaatcttagctaacagggaccaaaggcaccttgggtattattaagaagcaaaaagtggtgcaccctgcaaaattagttagactggggcattgcttggtgacaagttctgagacatcctcagaccaattgcctccaatgtgcatacaattcatgactttgcttagaagaagtaagcaaagctaaaagactacaagctggaagccaaggagctgctgtatacacatgtacctcaggaagaaaggtgaagaaattttaagacacagataacaagtatgagtatcaataggtggaatttgcttatctttctgcacatgaaattgagaaggaaaatgtccaggcaaatgcaggaaagcatcacttggtttggaagccaatgctttcaaaaacaaaagggaaaaacttaagactcatgttttgtttcagtaaaatgccaatatgaaatatttacttaaattgcaatagaaatgactcaagggataaaacacttgtatgaaagcctggggatatgagttcagatcccttgtacgcatttaaatattgcttcgtggatagagctgcttgccaataattctaggtcttagaagtcagaacctgagtgtctggagcaaattggctgaactagctgtgtaattagaaaagaatcgttagactagttggataggagagttttgggtgtacttgacagacttgtctcactgagtaaggcgaaaaatgtctgatgtcaacctaagcttctacaagcacaagcatgaacatacatagaaatgtcaatcacatagtcatgcatgccatacaaagatgcatccaaaaaacagcatatgcattatttcaagagttgcataagtttggtaccagcatctaagaggacatcttaatcaatagaggaataaactataattatagggaccccaaatagctcaggagcacaaaaattaaaagatgaaaaaagaaactaaatagatcatcacacacacacacacacacacacacacacacacacacacacacacacacactcacacacacacacagctttcaaaatgagaatgtgtcaggtcctatcttcttccaaccaaatttaatttaaattaagaaaactctggagacaacctggtacaaaggtccaacacagaaaagaaaagataatcctgtccagcaggtaaattaaaatatgttttaacctgtggtaactagtgcgtgcgtgtgtgtgtgtgtgtgtgtgtgtgtgtgtgtgtgtgtgtgtgtgtnnnnnnnnnnnnnnnnnnnnnnnnnnnagacagagagacagagagagacagagacacagacacagacacagacacacacacacacagagagagggagggaggagagagagggagagataataaataaagtttgcctgaaaatcagagtgcagaggtaagtgacatttttagcaatagaggccatgaagtggtaacacacacctttaatctcagcattcaacaggcagaggcagaggcagaggcagaggcagaggcagatggatctctgtgagttcaaggccaccctgggctacactagattgatccagtctttaaaagaaacagagctcacacatttgatttctgtacttgggattacatgcctttattcccagcactagggaggcggagacaggagtgatatggctgggctgagagaagaatataaggctggaggagacaggatctcaaagcattcagtctgagaattcttagggacagaacagcccctttggtctgacaattcagtaggtataagaactagtagctggctgttctgcttctctgatcattcagcattaacccgtatatttcactctggatttttattattaaaataaattagaattcatgctacattagtctgtgcctcatgggtctatataaattgctaagatagtcacagacagagtgagcaggaaaacattctactaagtcttatcaacacaagacacagctctcacctcaaaggtaagaagagtagatatcttttgagccaaatatggattgaggttatttctttttaaattacctttcattaaaaaataaagttagttcaaagaagatagtagacagttcatatatgaaaatgaaaattaacatgctgcatttatttggtaataatactgtgaggagaactttgctttctaaagaaaagacctcttgtttttattcaacaaacgtgctttggagctatgcagactgattataaggacccaaaacaagggtctgagattgttgggatgttcctatctgccaaagtgactttgtttactgttcctaagttagaatgtctattgatatggctgaaaatatcaaccaaatttgtttggattattttgtttttatagtgttggaattatcacttcctgagaaatctcccagggagtgaatcccaggagactgaagtgaaagatcttaatcttaatataatctgctcataattgagtctatatttgtctttgtcccatagttaacctttctatttaggattgtgtccattgccaatctcatgggtagtcctaagagcttaaagaaaaccagttctgtgtgcctagataaattatgactaaagattctgtctttctattcacttcattatacagttcaattgaaactccgaaaaaaagaaagaaaaactatatctgtgattaaacacgcggtttatatttatatatacaatctcatgaatattaaaattctaaaactataattgtgctgcaacatatgttaacttgtaattttataatacatattaagtaaagattcatatgcaaactagcattataaagccaaattttgtagggagttgattcattttattgagcaagaaactgcttaagaaatgtattttatacaaactctactcataaaatactgattctaatattcttattctttcattaagttaaattcaacagtatttctaagcagcaagatattgctggcttttattttactcactataaatacttgtaagtaatacaattataataatgtctatgaaagcattttataacctcaagaatattatgcacatggcatttatgtttcaggcctctaaatgtatactgtaagttttgctctcacccagtcaagcctcaattccaaaattaataaagacttactgtggaagtatgtgttaattctctttgtcatttatttctactgcaactactttcccctgacagttcagagctacccgttgtactgtattttagactgtgtaggcattatcttcaatgccataaacaaattcaattttgcatgaaagatgatatatttttattgatttttcttttaatactaaaaggaaattgtgactatgaacgtatttctttttctttcttttttttctttttttttggttttttgagacagggtttttctgtggttttggaggctgtcctggaactacctctgtaggccaggttgttctgcctgggcatatttccttttaatacaatccaaaacagtgactgtaatataaagaataaacagtcttcttcttctggattatgttatttgttagatggtaaatcctatggtgctgggtagctacttggatattagaacatttgaaggatgttcaggatatacccataatactcataaatatggcctatgaaaccaaaactagagctgtaaaaatctcattacacatcagagaaatgaagcatcaatacagactctggcatcaatacataatagaggagatgtggcatctggatgccattattgttagccagataaacatggttctcagagacctgaaccttatcagaaactttctgatgtagagcaatgatcattagacattgtgtttaaactccctgatgaatgcaatgcacagaatcacaatggtccttacaattgttattcactcttgcccctgctgagtgcctcattcactctgataaactctgctatcatttacaccaagctgtgtatcttgtcttaattatttacaataactaaggagtcaagcagatagagtgagtccccaaggcattagtacttactgagttaccaacacaaatgtgttgttgatatttggatgcatgctattctttctcactattttgtggctttgaaaatatgtatgtaattagaatataatgaattatgtgaaatatcaatgtacttcacaacaaaaataattcttagcctaatattttctagcaattcaatgatgaacagagtatctcagggttcacacactttgagtttaacaaagttgaaacagctaattattagagagcaatagaacagacacttagtgccttctacttctatgataaagcaaatatagtaagacttcatttcattatggttatcactcatgagaatgacaacagctttgaagaaaatggtttttgaaaagtcatagatagtagaaataaatcacacaatgaggaaaaaaatccctatgttactaacatcagctgacctcttatatctcttgatttgtgactatagttttgtggtcctttatgaagaagaaagttgcacagccttcaatcacactatgctgtcactggcagcaggaaatatttttgctatattcatacccatctcaaaggtaactccagactaaataataaatttttttccttgtaagaaccttgaaatattcaacctatcttcttccatgactgaggaaacttactgtccttgcccaattgcaaaagaacttcatgataaatggcctttgttaacatgtgagtttgtactttaaggtgtttcctaccaggactactacaaactaaccttctgaagtgtatcctgaagccaattaaatgtcttcctctattagaggttctctgatcatgatgtctcttcacagaaataaaacactgactaagacagaaatttgtaacagagactagggtattactaggataggttcaaccatgcttttgtttggaggaatataaactttggtactttcaattaggaaagcagttgcacactttaacaaggatttaatgaccatcctattagtaacagggaataccgtggtgtagtgggtgatttggactatggcaggcccaactcaagaagtttcaaatgcaaagaacacagcatgtggcatagagaatattcttgttatatttttgtaaagaatgtggctgctcttttgcacttgtccaaaaaaaaatcttcctgaggctaaattaacagttatgtattaacagttttgaccaagaaaatttctagacaacttagtattgatggtgttgtttggttactaattgccacatttctgcagatctataatgaaaagaagcaagccaaacaaggagaaacaaagcactggggaacagtttaaagaaaaatctgttccaaaatgaaataacaggcaagacttgatcatgctaagcttccaatttgtgaaaaggaattaaagaaaagcttagagctatgtttggtgggacacactcctttaattccagcacccaggaagcagggcaggaagatctctgacttcaaggctagcctggtctacagagaaaattccagaacagacatggtaaggcagtgaggaaaacatcaaaaagagaactctagtaaaaaaatgtttttaaaggaagggtccatgctctgaccacagagagcaatagaacatgacagctttggccacatggctctagctctaaagtccaggatgcaagtaaggagatcttaaatctccctctgtgattaaggaaagctactgagatcacatgtgtggtgaaagtgtccttgtagagaggccattgcatagtactctggagatgaattctggattgccttgaagagctagaaaagggaatggaacctactcaagagaaagaaatgtgctagagtcaatacggcatgccaacggacactcacagagggccaggtttggtcttatactcgttccccagctatcagacaggagtccttgagctcccacttgctcaggtcacctgtttctgtctctttccccagcatagtcttgatccatttgctcatagctcattcgtctatacaagtggattccaggaattcgcctcagtgcttagctatggatatctgcttctgcttccagcagccactggatgaaggctctatgatggcgtttaaggcagtcatcaatctcattataggggaaggacatttaaggtagcctctccactattgcttagattcttagttaggattatccttgtggatccctagtaaacctagtaaacctagtgcaaggtttattgttaagcccataatggcttcctctattcaaggtatctctttctttgctctctttctctgttcttccttgtgatatcatcccacattgccttctcccctcctctttctctcatcttctacccctcccccatgctcccaatttactcaggagatattgtccctattaccttcttgggggtccatatgtgtgcctcttagggtcctccttgtttcctagcttctcttacctcgtggattgtaggatggttatcctttgctgtatgtctaataaccacttatgagagagtctgtatctgggttacctcactaaggatggtttcttctagttccattcatttgcctgcaaatttcgagatgcctttttttttttttttttttttttttttttttttttttttttaccactgagtagtacctggtgtgtaaatgtagcacattttctttatccattctttggtttaggggctcctaggttgcttccagattctggatcatacaaataatgatgttatgaacacagttgtgctttgaatgtgtaccctttgggtatatgcctaagagtggaattgttgatcttgaggtagactgattcctattttcctgagaaaccgctatcctgatttccaaagtatctgtacaagtttacattcccaccagcaacagaggaatgttcctctttcatcacatcctctccagcataagctgtcattggtatttttattttggccattctgacaggtttaagattctttctcagagttattttgattttcatttccctgatggccaaggaagttgaggaatttcttaaatgccttttgccacttgtatattttgaagatcatcccactgtcagaaatgtggttggtgaagatatttcctctttctgtaggctgccattttgtcttgttggctgtgtcctttgccttagagaagcttcctagtttcaggatgtcccatttttaaatattggtagcagtgtctatgctactggtattgtgttcaggaagtagtctcctgggccaatgtgttcaagggtacttccgacttcctattctaagaggttcagtgtggctgaatatatgttgagtctttaatccatttggactcaggttttgtgcattcatggagacagatatggatgtatctgcaatcttctacatatcagcaatatttgttacagatgctttcttttttccattgtgtaactttagcttctttgtcaaaagtcaggtgttcatagctgtgaggattaatatgagggtgttcaattcaattccatttagacaaatggtctgtatttgtgccaataccaagctgtttaccttactatacttttatgatagatctggaagtcatggatggtgattcctctggaagttcctttattgtaaagagttgttttgagtatcctgggttttttgtttttccatacaaagttgagtattgttctttcaaggtttctgaagaatttttctgggattttgttggggaatacattgaatctgtagattgcttttggtaacatagccatttttactatgttgatcctgcctatccaatagcatgggagatcattccattttctgatatcttctttaatttctttctttaaagatttaaagtttttgtcatatgggtctttcacttgtttggttagagttacctcatgatattttatgatgtgtgtgactattataaagggtaatatttctctgatttctttctcacccatttattgtctatatataggaggactattgattgtttttagttaatcttgtatcctgccactttactgaaggtgtttatcagctgtaagagttccctgaccaaatttttcaggtcacttatataaactatcatatcatctgcaaatagtgaagtcagacttctttctttccaacttgtatccccttgatctccatttgttgtcttactgctctagctagaacttcaagtacaatattgaagagatattgagagactggacagccttgtcttgttcctgattttagagaaatcacaataaattttgctccatttagtttgatgttggttcttggtttactttaaattcctttattatgtttaggtatgttcccattatccctggtctctccaagaaaatttatcttgaaggtgtgttggatttcatcaaagaatttttcagctctagtgagatgaccaagtagttattcagtttgtttatctggtggaatacattggcagatttttcatatgttgaaccatccctatatctctgggttgaagcctatttgatcatggtggatgatttttttctgatgtgcttttatgtttgatttggcaggattttattgagtatttttgcatctgtcttcctgagggatcttggtctttactttttttttcttggttgtgtctttttgtggtttaggtacaaaggtacttgtagccttgtagaaagagtttagcaatgacacttctgcttctattgtatagaacaatttgaggaatattggtattagctcttcattgagtttctggtagaattctgcactgaagacatctgtccctaggctatttttggatgggaaaattttgatgactgcttctatttcattataggttatagatctatttaaattgcttatctgttcttgatttaattttttatatgatacctatccagaaaattgtcgatttcctttacattttccaattttgtggagtacacatttacaaattatgatctgatgtttctttgatttcctcagtgtctgttgttgtgccccccttctcatttctgattttgttaatttgcatgttctgtttctgccttttatttagtttggatgaaggtttgtctatcctgttgattttctcaaaagccaactctttgtttcattgattcttttcttttttctactttatttatttcagccctcaatttgattattttctggcatctacttctcctgggtgagtttgcttcttttattttagagcattcaggtgtgctgttaagtctctagtgtgactattctccagtttctttatgtgggcacttaatgctatgaactttcctcttagcactacttttaaggtgtcccataagtttgggtatgttgccttttcattttcattgaattctaggaagtctttaaattctttctttaattcttccttgacccaggagcaatgtttttgagcattgctcaatttctatgagtttttaggctttccgcaatttgtgttgttgttgagttctaactttaaaacattgtgatccagtaatatacaggggattttttcaatttattttgtatctgttgaggtttgttttcttgcctagcgagaatgtggtagactttagagaaaatttgatgtgcttgctgagtagaatgtatattcttttgtgtttggatggaatagtctatagatgtctgataggcattcccagtgataagagtggggtgttgaagtttcccactataagtgtgggggtttttatgcatgatttaattttagaaatgacttttacaatcatgggtacctttgaactttggacatagatgttcagaattgagacttcatattgaggtatttttcctgtgaagaatattaaatgactttcttcatgtcttttgattatttttagtttgaaatctaatttgttaaatactaggatatcttcaccagtttgtttcttaggcccatttgattaggaaatcttttcccaaccctttattctgaggtaaagtctgtctttgaagttgagttgtgtatcttctatgcagcagaaggatggattctgtctttatatacagtgtcttagcctgcatctttttataggttaaataagaccattgacattaaggggtcataatgaacattgattgttgattcttgtttttttacttgttgctattagtggtattatgtgttcatttcccttttgttttggcttttggtaatgtggggttatctgttgcctaattttgtgattgtagctaactctcttgggttagagttttccatccagtactttctataaggctggatttgtggatatgtattctttaaatctggttttgtcatggaatatcttcttttctccatctatactgtttgaaagctttggaaggtatagtagtctgggctggcattcattgtcttttagtgtttgtagaatatttatccaggaccttctggcttttagagttcttttgagaagtcaagtgtaatttttataggtcttcctttatatattacatggcctttttcctttacagctcttgatattcttgctttattctgtatgtttgttgttgtgctattatgtggcaaggggacatgtttttgttctaatctttttagtattctgtaagcttcttgtactttcattggcatgttcttctttaggttggggatttttttctatgcttttgtagagtatgtttactgtggtcttagctgggctttttcaaccctcttctttacctattattcttaggtgttgtcttttcactgtttcccttatttcctgggtattttcttttaaggattgttggatttaatgttttctttggttgatgaatctatttcctctagtgtatcttcaacacatgagattctcttttccatctcttgtatcctgttggctttgcttgcatctgtacttcctgattgtttacccagattttctttatttttccaagattccttcaggttgtgttttatttatggcctctatttgagtttttaagtcttgaactgtttgaattatttccttcacctgtttgattacattttcttgactctctttgctgtctttaagacatttgttgattacttggattctttttggtttgtcttttcttccatttattcattttttgttagtcttttttccattgctttaagggagtttctcatgggagtttctcatttcctctttaagggcctctatcatgttcataagttattttaaggttacttttttctgctttatctgtgttgggatgttcaggtcctgcttttgtagcattcctaggatctggtggtgtcatattactctttatattgttgattgtattcttatattgtcatcctcccatctattcctccagtggttacaggtggggtctctctatggtgggttgggggcaaaggctcagatagtgcagagtagtgatggatggtttgggctgccccgaggtctctggggatttggtgggcaggacgaggtgatgtgctcaagtcaagggcctccaaggattgttatagaagggcaggagaaggccaggtgttcacctctccttgtgggtgtgtggccaaggctctaatggcagcaaattctggatggtgtgggctgcccttgcatctctgggacttttgaagttggactaaatgcattttccattaaactgtggttacaaaccaatggaggcaggaaatggaaagtagaatgttgaatgaaaatgacttctgtagctacacagagattggcattattaggaggaggggccttgttggattaggtgtggctttgtaggaggaagtttgtcactggggacaggatttgagctttcagatgctggaaccaggcacagtttctctttctctcttcctgctgcctgttgctctagatatagaattctcaggtatccctcctgaatcatgtctgcctctgtaccaccgtgcttcccaccatgacaacaatggactaaacctctggattataatccatccccagtgaaatgttcttctttataagtattgctgtggttatggtgtctttttaaaatcctaacttaaacactaacctagcctgtgcatcattatagacaaacaacctcactcattattgtctcaactttggtaatgagtgctgtcttgctaactgtctgaatgttcagttttgtgtctgaacagctgctactccacatagtgaggatgacacacacaaggtaacttttacaagcccactagtgatttagtacacagaaaccttggtagcttcaaaagctcaggtgaggaacttagaccacatcctgtccataacttctgttcatgatatattaatagacttttatacatagtataaacagtaagaagatgccacgaaatgactttcttttcccactcaatgaatttccttctgtcacaacagataggtttaaatttctaaagatgactgaacatagtaaggtcttgttcttatttacattaccctgtcaacctccttgtatcatctccctttgtccctcacttttgctattattcctaaaagttgttaccatgtaatcttttatctaaacgccattatcttcaaacaccattatcttcttgagtagtgaaaattcaagtacttgacacttgtcacatgtccaagaacctgatatttggccttggcaggctgtgggcctagagggaatccaaagactgttgttatgctgaagtaacagtaatgaagtgactctttagggcattttcatatactcatagcacagtgagtcactcaagtcatcagagaagcttcattttgcagtagatggtaacagagagactcacaactgaacaatgtgcagagagtgaggaactttggaacacttagtccaaaatggcatatctttcacactcaaatctactctcaggtctcagccagtcctaaagaagaaaagaaaggaagattgtaagagtccgaggaaatagaagagacataggaagcagtggcttcaagacacaacaaaattcacacagatagactcacaaagaccatgacagcatgcagatggtgtgcataggttcactctagatgaagtctaagcactgagaagtgaaaagctcccatccctaaccaagaaactatggcaacttcttgcaaaagagaaaatagttttctgtaatagcttcactgggaatacaaaccacacttaagggtagacaattgtgcagtaatcttttggtacattgtgaagctgtgtctttggcaaggtaggttctgattgatttaataaagaactgaatggccaataactagtgaggaagaggttttgggcagagagaaagaagagatcactctaggtatggaaaagatgccagagaagatggagagaaagcaggatatgcaggaggagaggtaaaagctatcagccacatggcagtatgtagattaacagaaattcattaatgtaagttataagagctagatacaaataagtaaaagctaagcacaagctttcataattactactaagtctctgtgtcctgatttgggggctgatggtccaaagaagacttccagtgtaggccccttactcaacagtagattgccaaaacaaaatgaacttaatcatgtatttgtagactttttattttcattttgccttgtttggctatttttttgggtttttttggccttactgatatgttgcttgtatattacagtttaagatgttatctttgtatgcttctatttttcttatgtgtgtgtttcttgtgctttttccttttttcttttttgttttactattctggcttggtttttctttgtttatttatttgttttctgaagggaaagagaaggtgtggagttggtggaggtagatagaaagagctggaagaaggaaaatcataatcagaatatggtgaatgaaagtaattttcaagaaaaataaagaactatgaaaaatatttaagtattttgtgtttgcatacccctgacattattcttacatgtctgagtcattcagtacagaaatttgaataagaaatctttcagtgtcaaacctaacacagaaaaggaccttcagagattgctcagaagttaaatcattcatgcttttgcaaggcacctgggttcagttcccaggaccaacatcatggctcacatccatatacaactccaataaaggaggatttgatgacatctcctacctctataggcatcaaacacacaagtggtgagtatacacacatgcaggcaaaacactagcacatgtaacaaaaatacatcaaaatatttttgaaaatttaatgtacaccatgggcctaagtgtttgccagtttttttttttttttttttttttttttttttttttgacaattttttttcgtttgcaacatccagacaactatgggtaaaatagtcattttattttgtcccatttctgggttcttctttggtgtgcaaattaatctaaaattactgtcatatggagattagaattcccaaaagcacagaaaacactatctctgtattttctagttactacgacttgtataattatttacagtttattctttcagattttattttataaaacttaatattgttagttggtaaagaagtaaaatgttgggtagtcactggaatttatactccttcttctcagataaatacattgtatatcttattaactgctcaatactggaaccagcatcttgtaattgtcctgtgtgcatgaaactttgattggaattttataagctgaggtagaataacaggaaccttcttggaaatgaggaaaacagagttaacaatttcctaacctgacaacaagtggattctctgttgatataatactctatccaacagtcatcacttctggggttcaatctggggagaaaatatgccactcacttcctagtgatgaagtactttttttcagtctctgagtcccttaaatatatcttggacttcctcaaatcaatcatgtagcaccagcaatccagagtaatggttcatttcaaaaggttattgaactaatgaaaggtttagggaaggaaactaattcattggtggtgtgcaactcaagcatatcttccttttcttctgttgtcagactaaacttaaaaaataaagcttacctacaaaaaaagaaaatgaaacaaatgaacaacaataacaaagacaaaactgtgaagtattttatagaaccacaaatgacatctgtataagtggcatgtatattttatcagagagaataagtaaagcttttgtttattatttttaagtattaaatattacctttatatatttatttttcacctagcttacaaagttccagatttccttatggaacttgtctcaatcttttattttggttggttttctcccttctacttccccttatcttcttgatccttctttttctgatgtgacctttcacagtcattaatccatcttctttctgctgaatctattgtctttcatgccctacttcccttaaagcctcttatattctagtctcaagacccttccttagctttctggacttacattgttcccacctagatgcactgttttaagaacagaagttactttctgcatatgtgagaacacagagtcttttgttgttttcctgagtcagggttatatttttttaaatatattttctttgaactttttaatcatctttctaaacttgtggctacttctaaaataaagaaatctccagcttcaatcggtgtaacattgttaggcaccacatccatgaaggacaagtatggtctaatgtagaaactccaacaaggaggaaaactactggatcacagatttttgacatgatttttttttttattttaatacatcattttctcattttacataccaatcccagttcccactcccttctctcccctgtgtccccaccttactccaccccaccccattcagtcctcagagagggtaaggcttcccatgtacagtcaacacattttggcacatcattttgaagcaggactaagacccccccatatctaggctgagcaaagtatcgctccaaagagaatgggctccacaaagccagttcatgcactagggataaaatcttggtcccactgacagtggccccacagactacccaagccatacaactgtcacccacactaagaggccccaatttggtcccatgcaggctccccagatgtcagcccagagtcagtgagctcccattagcttaggtcagtggtctctgtgggtatccccaaaatggtcttgacccctttgatcatattatctctcctccctctcttccactggattccgggagctcagcccagtgcttagctgtggatctctgcagctgactctttcacttgctggataaaggttccatgatgaaaattcaggtagtcattgctctgattacaggtgaaagacaattcaggtaccctctccactaatatttagggtcttagggtatttttgtggattactgataattttcttagtcacaggtttctcctaatgactctctcaatcaaagtatctctttccttgctctccctctctatcttcccccatctctaccaccccattccctcatgttctccttccccctcttcccctccccctccctttctgctttcttttctcctctcccattatgctccctattttcttaggatatcttgtctatttctcttttccaggagaatacaggtattttagggttcttgttacatatcttctctggggttttgggctataggctggttatcctttgctttacatctattacacacttatgagtgaatatatgccatgggtttgagttacctcactcgggacagcttcccatgttttatctcatatttaccatgtagagctatattaacaataaaattcactgtggaacagtgtggggatgctgaaaggaacgcactccaggaaataacttgaatattgcattttgctattctcatttctcaaagtctgtgaatctttaaagttggttcatacctggccctgcaaattaatatgacatttttttctaaaatggacattttattgacctcagaattgattttaatttcaatataatttaatgtatacacaataatgattgttcgcaaagaattatcttcaggacttctgttcgatctctgatgcattctttttaaatttattttatccactgttatgacacatttccattctttcattttctatggcccaatttataattctatccttttactttgtcctttcaattcacccttttcctttgccaatcaatgtctataaatacctgaagattttatattggataaagatctgtagcatacattggggtttataatcaatatttagatttaatgggtgtgtttaaagagtaaacaaacaagtactttattactataattcatcactcaaactatagcaaagcattaatacattgagcttctagggcaaaactgttaattcctctgtccttaaaatgttagattctttagctttgttttatttatatgtattttgtcatcctttgtaaagaatcacaattaaaaccacatagaagataatatccagtgttcaaatctctcccagtatctccaggtatcagacaaacctagaatggtacacatgttggcagtacgagttctaattgctattaatagtaaaaacccagagtcagatatcaggataaatgctaaaagatcagagagacaagggagcaagttgcagctacctcttacctgcccaacctcttaaccaaaaagagcaaagttcctgtctcttccctgcattatcactttctctctcctcccagccatatcattaattgattcttcttcttaggtgctgggattaaagtttccaccactactttgcctccatggttaactcatagctatctttgccctctgatcttcaggcaagcttcatttgttacagtacaaagaagatatccccacatttcccctttttggctgaaataaaaaagattataattaatagaagaaaaactatatataataggaacaataacaatatacaatatatacaggcaataaatacatcaacaatgtctactccatgaacaattgacaaactcagacaaaatattctatatctatcctaccttggtgagtccaaatggttgtacataactagttttctattcttacttgtagtaccaaaactatctttttatgtctctcaaccttatttactttacattttttactgaatttcttttctgaatctggtaacaagggaaattataaccgtaaatatgaagtcttcaattccatcagagatacaggaaagaaatattatgcaaataagcatcaagtacaggcaagcaaattcaaaataatgtgagaaataacagaaatatctagtttcctaaacagtcacacaaggttcctctgcaatgtcggggcatccatctttgactgaaaggcatagtatatctgacagaattttctgtgaagcatgatattctgaagggctgtcctactttgtcttggcaaagttcagaaatcactttattttgtgtcctgcttgtcaaatttggacaccatactgccagcaatcaaggcaagagtattttcttgcccagtggcttaattttgtcacaaagaaagtaaaattccatgtggagttgatttggtacccatcatcttctccaaagtagattgatgctgccaagagaaaaaataactcaatgtcataaaaagaagaacttatgttattaaaacctcttaattgccatattctgtagatctctgaagtgtttgaagacagcctgtctatttaaattatatctctgtttgacctaatatgactacacatttgattgtagtaggtgactaattgctaacctgctttcaagggtaaaaaattgcattaatttgttaaatgagttgcatattacaataccttgaacaagattaaaaatgtatatactgtatgttctaacaaaatcttgaatatttatcaatatacaaaaatccatatcaatgtaaaatatttaaatctagtagttgtcttttggtttaaaagtagattcaataagctaccattatcctaccatggctatactcctctttttttcttttcagacaaagattcctgaatattcctttgttcaacttttttttctgattattgctaataataacttgtaaccaactaccctaaattgttacagatatccataatccactgaataaacaacaaaccatccaccacatctcttggggatgtgggtactgtgttcttaaattcacttccagctgtcttgggatgacagcatctttaggttatcctgaaaagaaaatatgaattaattgtcaagtcctgggagaggtaactatatcattcgtcatccagtctctgattaatgcgaaagtgcagggcttctctcaagtcctggctagagtagtttggaaggttggatcatttccactagccacctcaaaattgtcctgagcagtttgtagtccaaagcagatcttttttatgtggtatttttcagcttagttgtgttatcatagtcttggtggaatcaacatttggggccctatcatccttttggagacttgaaaggtttctcttaggcatggctatggttcattacagaaaatgtaaatgatttaaatgtgatatgtagcagatctcaaagaggttaaaagatcaatatttgttatgtgtatccagagaacaaaattctaattcctagttatctgatagagactcaaacctgaaattatgtgcagaaagcagaatgaagcctttttctagaattagtactctatatgaccattaatatcatgacaaaaatttaaaatatgtgtatattagtcttataaattatgaagtagtatttataccttaaggaaagctttgagtgtcaaaataaaaaccaatggattatgagatcactgacagtaaaatagtccttatattttgttttttcttctgtcctatatcaggtagcttctttgacttgaggcagagatcatggattttactttagcatgcatacttgggtttagagaaggagagagccacactccaactttgatttttaattggaccaggaatacaaaatgaccatttgcattatatgtttgtagagaaaagcagaaacaaacatttgggaaaatccataaatatttattctgttggagatgtgatatactaaaggccaatttattcattttcttgggacattttttcatgttgcttcacatgtcttatttgtctagcaattttcagattctgtagctggatgccttccttctcttctatggaatccccacaccaataagacactcagttcctgactcaaccctgccttatcacttcctctctctctctctgattttgcccagccatcttatttcttgtttcccccccccagccactaggattaaaggtgtgtgtcagcactgcctggcctctatggttaatagtggctagcctctgatctttaggaaagctttatcaccacacatgtccacatacataaaccaatagaaacagtctatcctcaatacccactaaaacttcaaagcagagcccacagtgtggtaatgttctgttccttatgctcttattatctagtacatttcctaatgtggccacctttctcaagtaataaatgttcacatgtcaacttttctattaccttcaaatgcaaatacaattctttaaagatttaccacccccatctcttaagtttagatggaatttcttgatatgacagcatttgtccttacaaaaagagaaggtttaggaagcatgtacatatttggtcctcttccttcttaatggtttaatgattgacacaaacaaaggtgttaaaactgagcacactccaagggaaagaagctttaccaaactatttcattaaataatttccatttagccacagaagggggttgactttcattgaaagttttattctagctagatgtatttccaaaaaaaatatttctttccaaaataatgttgaaggatttgatccatagttagacatagttgaagatggatttgaattttttgtcttcttgcctcaacccaccatgcactgggtttacagttaccaccacccttgatttataaactgctggaaactaagcacagggtctcatgcatactagataatgactctatctactaaggtgtatagtttgctcaagtgtctatttattttgaataattctactttggccttattttacatgtatctatattctaaagttatataacctcacagagatatgtgtggaagccatttacattctgttatctcaaccatgctaggaaaaccaactctaatattaccctatacccacaattatattgctgtcatcaagacacaaggcaagaagctcatttttctgctgtccactaatttcaagattttagaaatgtgaggttacattctcttatttatcataaaattggtcaaaagaacagacacatcagcattttgcttattttcaaataagaataaatttattcaaggctctagaacacaagttttgattattgtcatccaacagcataaaaagtacaaaacagatcggtgtatttctaatatattaaaacaaaatgtacagccatatacagtacaccctataggcagagaggaggggtaagagactgtggttggggtctagtaatcatttatcttcacttcaaaggttgttcaagtatttaaatccatatgtaatatttcagcaagacttctaggtatcatttatcccttgataacttttatatactaaattaccttaaataatatatatttcatattgaagagttattgtataggggatatttttactaaagaagaataaacagttacctaaaaaccaagaaaagtatatcacactgaactaagcatagttttcattattttataaccgtgattcggttttcatcacccataaaacattaagagtagataaaaatgtctagcatgtgtgacaggagaaatggcttagtgattaagggcattttctgttgtggaagctgactgaagtttgcttcctaggctcacaaatacctctgaaactggtctgtaagggcacaagcatgtatcgtaaatgaatatacacagacaggaacacataaataaatgtaaaacagatcagctttttttgaaaataatttttcctctcatactatacatgccaaccacagtttcccctccctctactcatctcactctacccatctcctctcttttccagatgcactcctcctcctctgttttcttttcagaatagagcaggactcaagagatgacagccaaacagaataaaacaaaataaaaaaaatgacattttggagtttggtatatttgtgggactttttaacaatggaatcaggggctgggtcttgggaaccaactcctcttactggattgccttgctcagcattaatacaaggagagttacttacccttacctcaacttgatatgccttgctggttgattcctatgggaggcctgcctctttttgaacagaaacaggatgaatggattgggaaataggaggagaagagggaggggaacctctagttgggatgttagttatatagatagatagatagatagatagatagataggaaaaacaaggcaaaggctctcttttagagtacagagaaggcaacccaagtggaggaaaaatggataaagagcaggcaagagtcagtgatatacccactcttgctgttaggagtctcacaaagacaccaatgtaacagctataacatatatacaggggacttggttcagacccatgcagggcccctccttgctgcttgagtctgtgtcagcacttgtgagccctgattaattgactcagtgatacatgttctcttggtcctccccaccccctctgacttctacattctttctacctgtttctgtagagttcctttcctgaggggcagtagcagacagagaattctaaattagactctgcatatattgctgtgggtctccacatttgtccctgtctgtttccagaggaagactctctaatgacttctggagaaggcagtgatctatgagtataacagaatattattagggatctaagtgttggtcctttcaaaagaaaatcaagataaacagatcactacccttaatagctaaaaggaagaaaaggaagacctaagttaacaggactaaaagtgaacaagaaaatgttacaacaaatactaaagcaattctgaatagttgtttggtttttccccactcaggtctgctggtcatcttgtgactaagtgtgacgtgctgtgcccttccacattggagtctgctgaccatcttatgactaggctagagggagaatacttgaatataataaaagctctatctaagaaacatacagtcaccattaccctaaatggagaaaatcttggtaacattctactaaagttaggagtgacagtggtagttcattgtccccacatcttttttatgttgtgcttgaattactatctgtagaaatgacacaaatgatttaaaagaaagggatataaatagaaatagaaaagcaaatatttcctatttgcagatgacatggtgccatacattaatagatgcccaaaattttcccagagaacatctagaaatgatgagcaaattcagtaatatggcaggatacagagttaaactgcacaaatcaataggtttcttatacaccaacaatgcaaatacagaaaaagagctcatagagaccccatccacaacaacctccactccaaaaatctaggaataaacctaagcaaggaaatgaagttactttacaatgaaaactttaattctctctagaaagatctagagcaaagcactaggaaatggaaagacattccatgctcctgattggatacaattaatattacaatcattttaccaaaaaaaaaaaaacatttagactcaatggaatcccaaatgatgccctgatcttatttattatagaaatacagaaaaatatttttatattcatatgttaccaaaaaggaccccagatatccaaaataatatagagtgaaaacaatagtactagtattgcagagccatggtgacaatgattccctccaagagacaaagactttatttcaaaaactctaatatcatgcatgagaatatttcttttgtattgtttatcaaagttgtccaaaagattctcaaaacattatatacttttgctactgcccttgattaccccatagttggaatttaaatttatattgctgaagagaattttcacttctaatacagggactagaggcccctacacaagaactgaactgtgagccttatacctcatgattagcttacataacaccatcgacgttatgaaagctttcaaaggaggtaggcaaccaacagtctacccagatcaatgactgtgatccagaacaaggatctgcatggtatgatatgtaggggaagctgtagccacacctacttagggcatggccagggtgacatagagtgagaggttcaggtggctggttgacttttgttttccctttcagcttgctgtacagactgttgccacgcgggctggctaggtcactttgtaagtaaggcttttccctattaaatacccttatatttctacctgactctgtattggtaatttcccaatatatctggttgtcaggagtgggatattggaaacctacaccccatttgggacaggctgtgggttcaaccaggccagcagcctaggctgggaaagctccctttctccacaggtgctcccggctcccagccaacctgctgcaacacacaagtgcattcctgctgcagctgagttgctcagaaccatccacccagcttggaggcagtttctatttgcctacagtcgagtaggcctctgctttcagcaggggcttcccctggccactgctgtggtaaaaccacatctatttcagtggttgcagccacaaggcggtataatctctaagataagcgcagctacttttgtgacctctctccatcactgaccaaccactgccaaacgacacatggagtagctgaacgcctgtgtcacctgctggtcaaagatagttactgcatctggagtagaaatcaggtaaaattatggcggaatatttatcatttgttaaaattggtaatatttttgcttattacatgaattcaatgtttgaggaggatgctaatttgccatttacaggcctatatgccataatggcagttagcctactggtacaaataatattactagccagaggactcaggaacagggacagagataacctcacaacctgcttgcaggaaataacagctttacgcaatgaggttttggagaacagattaggtaagaccacaattgtgcagcaagcagaaaaaaattggatgataagcttggctctgtgtccaatactctaaaacagagctgtctgttactcaagatgagatgcagcatatttatgataagataaacacagagagatcctccatgtctgaggccttagaggctaggctgccagaagaccgtgaaaagctacagaatatctgcagtcagctagaaactcagataggcaatgttacccagaaactagatacaaaggtgcaaaatacccaggatatggttgaagaattgtacaattccaatcaataaattattgaagcatctaaggtagcagatcacaaatttgagtctagatttgaatgtttggaagacaatttacagtacagggctgacagattacatagttccatacagtggattgctgaggactcaaaatcagcaaatcatgacctcgaatctagtctctaataactaggatgcagtttccatgccatccagatcctgcctaaggatgatcatattaaagacttagaaaaacatgtaaatgagcagttagagcaatttacagattcactaacgtgcttggaatcttttatgattaaggagattgaaacttttcaaaaggatatcattgctaggcttaaagatcaatgggatgcctcagaagcagaatcactccaatcccaggcacctactccacccaggtatcgtgactattcttctaaggttgttactcgtacaccattagtgtacccagctaccatggtagaaaagccagcttctaagaaaaaccctcatggacagatggcttatgaatggcaaactattcagctgaaggatcttaagactattaaagaatcagtggtctcatatggtatccatagcccataagtaaaacagctattacattcatgggcaacctttaacaaggtgacacccacagattgggaatgattggtagcagctgtacttgagaattcatgccaaatccaatggaaggcattgctgagggaagaggtgaagctccttgagcatcagggaataaaggaaggttttgaagcccctctatataaaattcttggtgagggtatttatgctaacccagaggctcaggctgaatataatgacgatatactgtccctatgcaggaaagcagcattaaatgcctgggataaggttgctgagccaggagaatgcctagaagcttataccagaatagaacagggacctacagaacagttccaggacttatttggaaggttaactagggcagtagaattacaggtaacagatccagaaataagacaattaattatacatacaatagcttatgaaaatgcaagcccaatatacaaaagaatacttttgcctttaaagatcagatcagctccgctagaagaatgggttttgtatgcagccaacattgactataatctgcaagacactagagcttgggaaggagaagccatttcaaaaggtttaaaaggcaacaggaaattaaatgttctagaagtgaggatgcaaaggcttgggaaggagaagcaccttacagaggtcaaaataggtaccaagaggctagaggttactactactatgaaccttgtgtaggaggagccttcccctggagaccacaaaggtgccaggaacctagatgtttcaactgtggtaaaatgggacatactaagaaaaattgtagacaagcgaaatctttgtttttgttttgttttgttttgtttttttccaagcggctagaggttactactactatgaaccagaaccttgggtaggaagagccttcccctggagaaaatgaagggatcaggaacctagatgtttcaactgtggtaaaatgggacatactaagagaaattgtagacaaacgaattcttacaattcctcatgtggaaggccactgccttctggattgtgtagaagatgaggtaagggcagacactagaccagggacatgcaaggaaacccgttaaggctgggaatccccgaggggtgcctcaagaagtcccccacatcgagaaaggtccagtcgttcccagtagcagtggaagacaatctgtcacaggatgaatagatagttctttgcctattgtgaaaaataatacggctctagatggtagtttgaagagtgatgaagaatcaaatgtgaatggacaaaatgagaaacgcatattttggtaaaattctattaatggtttgtcaagcttctattaataataaaaggactcagttgaatgtgaaaattaataataaagttattactttcttgggcagatgtaactatcattaccccaaagtcttggcctcagaaatggcctcttagagaggcaaatgtacaatttttaggaattggaactctatctagagtgttaacctggtggtctgcattggaccggaagtacagaaagggatactgaaaccatatgtggcagatatacctataaatctctggggtcgtgatctcttatggtaatggaatactcagattaatattcttccaatgttggatacaaattatatataatctttagatagtagaaaagagctggtaagacactatggaaaacgtttactgtacagaaactaaataaaaatgatggaccttcagaggaaccaaaggccctgccattgaagtagcttacagatgaaccagtttgggtaggacaatggcctatgacctctgaggagctagaggctttagaaaagttagtacagaaacaactagaggctggacatatagaggaatctaccagtccctggaattctcctgtatttgttatcaaaaagaagtcaggtaagtggagaatgctgacagacctgagaaccataaataaggtaattcaaccaatgggctctctgcaacctggaatgccattaccttccttaatacctaaagtatggcctgtcacagtcattgatctaaaagactgttttttcacaatgccattacaggaaaataatagagaaaaaattgcatttactgtaccaactcttaataattcacagccagttaggagatatcagtggagagttttgccacaagaaatgctaaatagtcctactttgtgtcagccctttgtacagaaacctttggaaataattcttaagaaattttcacaatctcttgtttaaccattaaatggatgacatttttttatcagattctaataaggaaactttggaatgtatgtttgaaatggtgaaggaagttcggcctcgttgggggttacagattgccccagaaaagatacaaagaggagattctattaactatttaggttacaagatagacttacaaagactcagaactcaaaagttacaaattaggagagatcgttatcaaactcttaattctctacagaaattattaggggaaatttctcaattacagacgattattggtgtagaaggacatgactgtaacgcatttaaaaatggcccttaaaggtgataaggacctaaacagtccgagaacagtatatatatacaattaatgaaaaaaagaaagctgtgaattttatggagagaaagatttagcacatgtctcatattttggagggttggggaggaggatagggaaggaggacatgatgtaaatatatttatctaaagatactaaaattttaaaagtagatactagtccctaaactgtcatatgatgtacctgtgaaaacgtagactgcaggccttaattgtttctatgtaggcccagtactcaaccaaagaatctgcaatttttgttattccatgatgctaatgcagctagtctgtggcccacccttttacttatgtaaagttctatgtaattgccttttattctttttttgttgttctctattctttcttcatagtttttctaaatgccagaaagcaagggagattttcctataaaattctagttcctttatttaaaaaatattctgtgactaccactatggcattagaactcaaatgtctaggggctagtgagctggctcagtctataaaatactcaaagttttggggagtttaacttagatgtccagttttgtttaattgatggacatggccccaggcttgtaatcccaggactcaggagctagagagctgatccctgggtaaattgactatgtctactagctgaatagggtgagcattgggtttatgcatgtctcaatacatttggtaggacaatcaaggaagactatgtgaacttctggtctccattcgtacattcatatgaatatgcagagtgaacctcatagatgtgtgctcatatacattaaactcatgtacacatatacatattcaaattcatgcaaaataaccccaaaataaacaaaaaatacaaatatccagcttgtgccaatggattcaaaagtaataccacatttttttgcagctagatggaaagttctctcttatttacagaggtaagacagtttgttttatttacccttttgcatgcaaaaaaaaaaaaacctcttttaaatctctcttcaactctgagtttcaaattcaggtgtcaatgtttaccatttctggcaattagactcttgatttgggtgctttatctaattcacaaataatgaattgggtatttttgatgtttttatttaaattagaaaaaaattatatatgaatcccacccagttccctcttcctcccattctatcatgcccctctctgaccccaatcccatccctcttcttctccatagaaaaggtgaagccttgagagtttgtttggaggttatagaaggggagtgcagctactcatatactattgatggaagactggtccctagcagaggccttaccctctccgaagagcagaagggaggtggggggaggagtgaggcgagttggaggagaggaggtagggggaactgagattggaatgtaaaaaagaattaataaaaaagaaacacaaacaaaacaaggtgaggccttccatgggagatcattaaagtctgtcacatcatttggggcagggcataggctctcccccatgtgtctaggctgagagagtagccctctatggggaatgagttcccaatgtccatttgtgcactagtgataaatgctgttccactaccagaggccccatggactgcccaggcctcctaaatcacacccgatattctgggggccaagttctgtcctatgctggtttctgagttgtcactctggggttcatgagctcccctttttttcaggtcagttgtttctttgggtttcctcagcctggtcttgacccctttgctcatcattcctccctctatgaaactggatttgggtatttttaatccattgtataaagcagaggtctttgaatatttatggtactggggtggagaaaaaaaatgactggatttaaatgaaatctgagatccctggctagaaagcaaatgatgaaacactgcacccaaattatctagattccaatgctctgtgaagaggaattctttaacaaataaaatttacagtcatagggcagaactgaaatgagaggtgaccccatggactagtcagtgccacctaactctggagattcaagtgctgctttcttaataatcaagcactgtcattgcatttaacttatttttcttaaacagaagttacacaaatatgagtgttcttccctttgtttacttcagtgggtgtggtcctttgcagttgtgatgatgttgagtttgagccaatcttgccctctgttcatatgacagtgatatgaagatgcagtcctacactttgtgacttccaaggaatcaccctcttccatagggtaatgagcagctaatacaagctctgcccctagtttatatttataacatcaacaaaaacattttcttgatgattccttggggcaccaggaaatttacaacatgatatccactacaaagatttcatgaaggaaacaacaaaattgaagtgaaaaaaggtgcaataaaatgaaataatgaaatgaacaaggaacaaacatagaaacttatcttggtcttctgctaagattatggtaagatggaggcaaggtctccagaagtcttcatagtgaatcaacccctagtgtctcagttatagcaaacttggcagtataaataaaagctggaaataaggatctcatatcaaaaggaaaaaaaaagttttactttctttaaaagtgcttaagcatgtgaagaagagaaacaatattgggacagcatataaaaggcacattcattaaaagttaatggtgtaggatacagataatgagaaatagaaatggaattcatagagacatattatctttgcagtgcgtggcaaaatataatgtataatcaacattactgcagagttccaagggctatttttataccagggcctttagaatccaaacacattaaagattcatgatccccaaaccatgtgttttccacagttagaagcatttatgtcaagtgagcaaactgtttgctaactgaaacactagctttccccattgtaatagatagcatcgctttgcctgactcattcatcctgtaagcataaggtgaatccgtgtgactggatgctctttttttttttcttaaacccacaaatttattgctattctctaaagttaagtcttctcagtttccagtccccacaaccatagtgaccatggctctgttctctgtctgtcatggattcccacagtcctcatgactgtggtgagcatggctctgttctctacctgccatgagctctcactgtatgttcatttttgacacatcactgatttgttccttggccatcccttccctgactacttctattacttggcccttgaacgttgaagatgtaatactctctgtgagtcctcctagttggttacatctgtgtcttgtattctttcttgtgacaggtgggtcatgtattagttcccatccccagggctcacttttactcatgttcattctcttaacaaatatgacattttttatggctgtctctaacatgccaagcaaaaatgatcacttccaaagaatgtaggatatactcagtgattaatttcaatgattagatattaataaaagaagcaaacacataaatatagaagtcagtctgtggccagtgtcacagagcagaggtatgttgtggtaagagctcatagatcttattgggacagacagcaaacgtttatggggaagttcatgttgttgttttcatctgttatttggatgacctgtacatgattttatttttaaattttttaaaacattttatttatttattatatacatgacattctgcttccatgtatatctgcacaccagaagagggcaccagatctcataacagatggttgtgagccaccatgcggttgctgggaattgaaccagaagtacagccagtgctcttaacctctgagccatctctccacccccacatgattttatttgttaataacttgcatcatgtttgaaatgaaactgtcatttcctgatggccagtgtacccaggaattttagatgggtgaaatttcagcattccatccctcctacagctcatcaaacaaatgctgcattttgttctttttttttcctttttttatatttgagttacaaacacgattgaattacatgacaatcccagttcccttctccctcccctcctcccctaccaccccccaactaaaaccctaccaatcacatatcctttcttctaatctatacctgtctcaacctttctgctccctcatgacctctacatccttcttcttcttcccttctcattctcatagctccctccgccctcttcgcatgatgtcaatttgctcaggggatcatgacccttttggatgctctttttaaagtgagaaaagttcataactagctatacctcaaagaaaaatcaaataagtgtatggggcatggaggaaaaacagaggaggaaggaaggtggcagaatatagaacttctcaagcaattttgggaatctggctgggggagtatctagatcaagttaattgacatacaaaaataccacccaaaatgtggacagcaccattctcttgacaatgtccccagaatatttttaaaaagagaaaaacaatctcttcctgagtgtggatgcaatggaacaagttgcctcacattcttgataccttatcttctctgccccgctcagactatgagacaaactcatgctcttcttcttttcagtggcttctgtcaggtttttgccacagcaatgagaagaggggccaattcagatactatagagactggagaactataatgctttttaatgcaattttacaggagaaggactttggagatcaaagtgttgtatattttctcagagttggtaatcatcacactccattcttctcctgagctgtctgatgtgggtgctgagaactgaaatctagttgcctgcaagaacagtacaatgttaaaccacagagctatgtctgtagctcttggcttttcacttctaataagtgagatgtaaagatgagttagaaatgaaaaatgatggatgatattaccaccgagttttacggatgtaatacagcagcttcagtagagtactgttgtgtttccagacctctctaccacttatacttcccaccctaaccttacatgctcttccagtttggatcaagtttggaacttctatggtattcttcactccttcaatatgtaggataaaattagcattctcctctctcacaattcttttatttatgtatatgtgtgtatgcctgtatgagtgtagcctgcatgggtagggtactcaaaagggtcagaagaaaggattagatgccccccctggatctgacgttgtaaaggtcataagatggctgacattggtgctggaatccactctgtgttctcagcgagagcagttaagtgttcttaactcttgggcaaactctttagctgctagacagcatattttcaattctaattatggccatctcattttaccggacaaattaatatttaagtttgatatatttaatatatgattccattttcaaaactgcaataactagcatttatgaaataacagacttattttgttaaaaattttaggagcatattacttttgacttaatttctacattagaccacaataaatcatttcaaatgaagtaaaaagtgtagttacttaatctgatttacaataaaactgaagctttaaggaattagtttaagcataaataggccattttgcatttaaattcaggaaattttatttcacttgtgtctatatagtagatgtcattctgtttgacccttacacaaaaagcaagttgaatttgagcagttagtttattttcctcttgttatgtttctttgccctttcattatatgactgattatccatccatatacaagaaaaaggttcttattgttttcttaaaggaggtaggtaaacctgtggccatttttactttgggtattattttctataggacaatgccacgtatatttgtggtcaaagtggtttcaactaattacagtacatagcttatttttattgtcatgatcacatatgtatcatgtgtttagttcagtttgaattccctggaaataattgagatgaacagttttgggcagtatgttgattgttatatttgcaggtgatacactaataaagggcagaggaagacaggaattgagcttagaggaaatattcattatatctgaaaattagttctcaacaactccagaagagaagaatagttctgcagatgattgaactgtccataacaggcctgagttttacgtgctcttaacttactttccagaatctgtctctgaatatggttgatactgaaaaattttctaggaaggttgtcaactgtgagatcccaccaccaatgtttagaaaagaaaaatgtgtgaagaagtgattaaccttaaaagtggattcttggtggtttagtgcatttgacacatgctaaaagaaaaaaaatctatctaaaaggatgataaagttctcaataagtatggctaagaaatggagacaagaccttggaagacttggtttttcagttcaccttcattctgcaccttttgttccatggtaactaactcttatgggtgaaagcaaaagtaagaatcttctacagttgaatgattaggaagtttgggtttcacaaacatgtaattttagttctttctcctccatagaggtgatatgatctagaagttgagaaatttataattcttgactaatgtacatcttggttttaattagaattattagcattactatgactattaatagaaaagtgaacaaaataatgctgaaaataccagagggagaagagtaggtagattttaaaatgttatgaaactgtcaaaatattgaataattttttagtgtttctattacaaatttatgggcaaaccagaaattttcactattcctcttcattctgtcagaaagctgaagatcagaagaatttaatcacttaacttgactctcagattacttaggaatttggtaaatgatgcctaaatcattctaaatttcagtgaggtatacatctgtcagtcatctgctacagtcaaagaaataaagatttcaagctcagaagttttcaggacttcttctttttttctttcaggacttcttatacaattcatatctgaagtttatatcactaccttggtccataagtagtattccctctggtaccaatcattttgctagtatgagttaagatctgatgtctgttatttgcatatttttacagcatccaggaaattgaggtaaaattcctgatttttgagagttcttggggaaataatcaaatataataaaataaaagggataaaaatattcaatatcaatatatatgaagcagaaataacaatataaaacaactacattcttttctttgttctcttattgtgactttactgattagtatttgttctttacatccataacatacaaccagaagcataacctacattgtaatttggtatatttatttgttaaaaaacatattcagaatttttatacagtgatacttatctgcatttgttttcctttagttcatttttcttatattgtctttggttttatggtaatatgactgtcataaaatgaggcagaattcattcttctctacctttttgaaagattataggtaggatggatattgttttctacttaaataacaaagaaaattgacatgagaagttacatgaaaatgttatcatgtgtaaatttccaattacaaagtcatatttcaattgatcaaatctaataatttttatgtttttcttggacatcctgtaggcaatacctgaaatcatgctttattatattctttacaagcctgaattgatatatttcttgtagtgcaattctcatagtaacttaattaaaagtattggtattgtctattattcccctttcatcatgagaatggaaattttattgtttttattattttttaaatttttattttatttttatacatgtaattagaccaatttaaattagaaacaagcttcttttgcatgtctatcccagttccctcctcccctgccccaccccactccctatcccaaaccctttctgctccccaggaagggtgaggcctcccatgggagattttcaaagtctgtcaaatcatttggagcagggcctagacccactcccttgtgtctaggctgagagagtatccctttatgtgaagtgggcttctgaagtcccttcatgtactagggataaataccaatccactaccagaagcctcatagattgcctagacctccaaactggcatccttgttcagggagtctggatcagtcctatcctggtttaccacctatcagtctggggttcaagagcaacccattttccaggtcagctgtttctgtgggtttctccagcctggtcttggcccagttgctcatcactcatccctctctgcaactggattccagagttcagttcagtgtgtagctgtgggtgtctgcttctgcttccaccagctactggataaagggtctaagatggtatataaggtagtcatcaatctcattatgtgagaaaagcatttaaggtagtctctgaactattgcttagattgttagttggggtcaattctgtagatatctggacatttccctagtaccaaaattctctttaaagctataatgtctccctcagacatgtcaggatggtttcttctagttccatccattttcctgtgaacttcaagattacattgtgtaaatgtacaacattttctccacccatccttcagttgaggggcatctaggttgtgtctaggttctggctattacaaataatgcagctatgaacatagttgaacagatgtccttgttgtatgaatgtgctcctttgcgtatatgcttaagagtggaattgcttgatcttgtgatagactgattgcccttctcccaaggaatctccatactgatttccaaagtggctgtaccagttggcactcccaccagcagtgggggagtattcgcctctctccacatcctctccagcataagctgtcaatgatatttttgattttagccattctgacaggagcaagatggtttctcagagttgttttgatttgcatttacctgatgactaaggatgttgtgcactttcttatgtgtcttttatccatcttagattcctcctttgagaattctctttttagttctgttccccactttttaattggattacttggtgttttagtgactagcttcttgagttctttgtatattttgaaaatcagtagttcataatttgactgattctgacctgggtgttatggcacattcctttattcttagccctcaggaggcagaggcaggtagaactgtgagataaacatgttgtacacaacaattttccaggatagataatgctacacagaagctctgtctcaaaataataataattgtaaataataataatgataataatctgactcttgtattttaatgtttcttcttttccttccctgttatatgttcttaacctaagcttttactcatttatttagaaaggagggtcttatgctcttgtctaggtttacacagaactaactacatagttcaggcttatatttataatgctctccctgccccatcttcccaggaaaggggtttgcagcaataagacatctcatctggcaatttattcaaccttttacttcttttttcctactttatgtttaatttcttcaattataaagtgaaactgctattttagaatttatgtattttggaaacaatgcatgataatattctcttaacactactatgatgaagatgttctgaatcaaagctatgttgaactatgtgatcattagtcatagcaaactaattatcaaatgtgaaagattataatgaaaacttcttataatggtaagtgtgaactcattgtatatgagttacatggtaatccagatactaaagtaataaacattgcttggagttcttatgtggtacttagacttcagcttcaaatgcaagtatgtagaaagacagaagtgaagatctcaaatgcctttggaaaatgatactctgaggtaaaacaacagtgatagcctataacatgcttggtttgtgtttgagttgcagtgtgttttctggatctttgaattcatagctccctaatgtttgaaaagtttctctccattttcaaccatatataatgtttgtaattactttttcacctttattgagaacaacacttgtatctatattagggtatttgaagttctgcttagctgtgagcattgttttaattactttgttgaagaaatacttattaattttccttttgtttgcttttgaatagcttttgtctgtttttcaaatttactgattttttccagattgtataatctgctttcacctatcaagagtgcacatgtcagtttatatattgttactcattttaaatatttaaatttagcttgtttatacttccattatgtctttggagttttctgaatacaattgatgcctttgtggcaattgtttaaatgtgtttgggagatggatataacattgtgtcattgtacaatctctattgattgagtttcctcttttctcaagttcctttatttgcaggatttctttgattatagtaaacactgtactttttaaattaatgccaagctatttatagtattacatcctttgatctacaatataaagaacttttgttatttattaaatgaagacagaggctgctttagttgaaaataatttatctctattactaaggcaagacttctctaagtgttgcattccaagaatttactgaatttatgtattctttattcttgttagtaaggataggcactgttcatgaccagcaggtatgttgccatcttagaattctcagagactcagtccttcacagtgccttcctgaatctgccagaaacactgagagttgatttttctaatattgttcaatctttgtttgtgaacatttattattttagaagataattccaactacgagatttcaatctcatacaatgggatgaagatagaagtaaatgggttaaagggaaaaaagatcagttgatcattgatggatattgactggataaataatgatgctggtgagagtgaaatgtcatatgaactacaatcaaagggtctttttgtcagtgtggtatattgggttcagaagtaaacactctgcagataatgatatataatgtataattgatactggtgattaaagcagtggcaaatcatattaaggattagtaatatatgcaatgggagagttgcagtttaggcaggttaaaatggagcagtcaagttgctcaaatgtagctggaatgaggttcaggtcacaatgccagatttttcttgggcgacatgcaaggttcttgatggcaagaaacctgctggaagacacacattaacaaccttcaaaggaggaataattagaatttattaaacatggtaaactatataataaacttatgttgatgttagcagaagaaaaaaaaactcctatcttcataccaaacctgaatcatacttatgagacacttgtgacacatctagtgatatgcatggcattggctagaaggctcttaaggatgaagggattatctatgaatatgtactatttttagcttgttattgacgttgggattagattattttgtaattctgttaggataaaccagaaaatgtaaattatatatatgatactcttgaaaataaatcttggctaaaattggtaaaaatgatttctgacaccaagtaaatacaatccagaaattctggattcatcacagtgatgaatgctgtgaacatgttagtcatcttatttgtattctttgtcctaactaaatacacgtgattctgtgattctctttaaagtaatcgcattattgtataccaattattataaatgtttaaatatgtttacaatttaactttctctaaaaggcaaagagtttacattttacataggagacagaattatttttaacttgggaaatgtatataaaatatgacatccacatatgaaaacccagaaggctgagtaattacaggaacatcttccaagtcattgtttatagcagcaatttatttaatttgtacttccaaaatcaaagctttgcatcattaaacttcagaattagcatagaaatagatacttgttgtgaaagtataaaaggatgtttaagaaccatcacaaggtctaacactgtcattgagaaaaatgcctttacatcaaaatagaaaacattggaagttaaagtcccataagacaagagcctatatttatacaaaattttatatatgattatctatttatctatatgtgtataaagctttaataagcatatgtacatatatgtgtacatatatcataaatgtgtatatatgcatatacatatatgcatgtctaccggtatgattgcatacatgtgcaaatgtgtacacatatttacatatctaatatatatatatttatatatataaagcatatgggtatatttatatactgcatacatatatgattgtatatatatatatgtctatatgtttgtatatatttataaagatattgtatgtatgtgatctcagaataatattacacctattcactagtctttgagtagaatatacagatgttgtccaatatcagaagcactggatatttcattagtattaattcctaatttacagcagtacattttctttaatcatcaatgaaataagtgttttctaatcagtgatctctattaatgttgtatacatatttaattagtttggaatttgtatcatatcaggaaatttatattgaagaatgattgcaatggtaatgaggtattttaatggcatgagacattgggatgatgcgtactcagcaagctgaagatcaaagcccttgatattttgaatgaacagagattcataagacagttagtaatgtaagcttctgcgagaaagctctctgattctaagaagagaagagctgcctagttttatactagattatggattcacactctattcatttcaacaatgattttggaatttctatggtttgctaagttaatatttctgatattttgttgcttcctgtctctactttgatctaattttcatccagagttttctacacccagatactcactatgcatatgtaattattggaacagaaatataacaaaaggaaagcaaaacatctaattaatgttaaaatcagtttcaacccagtttttttcttgatgattttcttatttattctctctcctttttctctctctcctcatgttttttttcacagcttttatatacgaacagaatcttccagaaagtacaagagtcaaaacggttgcattccatttgttaagtgaatgattataggtaaaaacacgtttttcatctccatcacatgagtaagcattttatgtattacaggtgataaacaaattattccaagaacacacatacattcatacccaagcaacttgttatagatttactgtgtggggaagtaagttgtttttatcaggtctttaactggcaggctgcattttgcagttactaacaaagggccaattacttgattacttatcttgaaacataatctttttaaattttttattatttttgattactcatatttagatttccatccccccatttcctaacactaccctcctccgatgttcttcacccaaaccacctccgactcatctccagggatagtgagaccctctaccaaggaccttcaaagtctgtcatattgtttgggagaggctctagaccctccttgctgtatctgggctgcaatagtatcacttcatagggaatgggctcccaaagtccatttgtgatctagggataaagactggctccattgtgagaggagccatagactttcttgggctcctagctggtacccacattcaaagactttggtttggtccaatgctgcttccccagctttatgactaggatctccgttctatcaataggtcagatccactgtttctgcaggtctctccatccccgtcttggtacctttgctcaatccttctccctcaccacaactgaattccagtaacatggttcagtacttttctatgggtatctgttcctgctttgaaccgcaaatggatgaagaatctccttcctctctctaccccctgcctccaatttggtcagggattcttatcccatcctcttcttcgaggaattaggcaatcttcccttggattcctccttgtttcctagctcctcggcaatgttgaatgtaggctagtgatcctttatgtataaaaatcaaaaatgagtgagtacataccatgtttatcattttgtgattgagttacctcactgaggatggtttcttctagttccatccatttgcctgtggatttaaagattccattgtttttttttcctgctgagtagtactccattgtgtaaatataacaaatttactcaatccattcttcagttgaggggcatctaggttgtttccaggttctggctattacaaacaatgctgctatgaacattgttgaacatatgtccttgttgtatggaagtgcattatttgggtatatgcccaagagagggattgctggatcttaaggtaaactgattcccatttttctgagaaactgccatactgctttccaatgtagctctacaagtttgcactcccaaaagcaatggaggagagttcctctttctccatatcctctccagcatatactgtcattggtgttattgattttagacatagtgacaggagtaagatagtatctcagaatggttttgagttgcattttcctgatgacaaaggatgttgagcacattcttaagtatttttcagccatcttagattcctctgttgagaattttctatttagttctgcattctactttttaattgcagtgattggtgttttgctggctaacttcttaagtattcttgtatattttggatatcagccctctgtcatatgtggggttggtaaagatcttttcacattctgtgggctggcattctgtcttgctgactgtgtcctttgctttacagatgtttcccagtttcaggaggaaggtcccatttattaattgtcgatctcaatgtttgagctattggtgttacattcagaaagctgtctcctgtaccgatttgttcaagggtgccacctaccttctcttctaggagcttcagtgtagctgaaattatgttgagttctttgacccatttggatttaagtttagtgcatggtgatagatatggatcaatctgcaatcttctacatgtctgaatccagttacaccagcaccatttgttgaagatgctttctctcttccagtgtataaacttagcttccttgacaaaaatcagatgttcataggtgtgtgggttaatatccgggttttcaatttgattccattggtccagctgtctatttttgtgccaataccaagctgttttcaggactatggctttataatagagcttgcagtcagggatggtgatgcctccagaagttccttgattgtacaggattgttttggctatcctgggttttttgtttttccatatgaagttgagtattgttctttcacgttctgtgaagaattgttttgggattatgatgggaattgcattgaatctgtagattgcttttgacaagattgctatttttattctgttgatcctatctatcttagagcatgggagatctttccattttctggtatcttctttaatttctttctttaaagactcaaagttcttagtgtacagatctttctcatttttggttagtgttaccccaagatattttatgttgttatttgctattgtaaagggtgacgattctctgatttttttctcagcacattcatcttctgtatatagcagggctactgattatttagttaatcttgtatcctgccactttgttgaaggtgtttatcagctgtaggagttccctggtagagtttttcccgggtcgcttatataaacaatcttatcatctgcaaatagtgaaagtttgacttcttcctttccaatttgtatcctcttgatctgcttttgttgtcttattgctctagctaggacttcaagtacaatattgaagagaaaaggagagagtggacagccttgtcttgttcctgattttagaggaatatccttgagtttctctccatttagtttgatgttggctgttggcttgctgtatattgcttttatcatgtttaggtaggttcctgttattcctgatctctccaagtcctgtaccgtaaagggatgttggattttgtagaaggctttttcagcatctagcgaaatgatcatatggttttcctttttcagtttgtgtatattgtggattacatagatggattttcatatgttgaaccatccctacattcctggggtaaaaccaaattgatcatggtggatgatttctctgatgaatttttggattcattttgccagtattttgtcaaatatatttgtgttgatgttcatgagggatattgtaattctctttttttcaatttgtctttttgtggctttgataccaatgtaattgtagcctcataaaaagagcttggcaatgccccttctgttgctattttgtggaacaattttgtggccctgtacagcaactaggttgtagtaaccttaaagatcatttgtgactaccaatcaggacatggtggctgattcactactctggctccccgtattttattagaaataagcttcttttctatggcaaacccattttcttctccctgccttcctgccatgctcctcagggagagtgaggatttccatgggggaagtcaaatctgtcatatcatttggagcagtgcctagaacctcccccatgtgtctaggctgagagaatactgatccactactagaagccccatacattggccagacctacaaacttacatactcactcaggtggtctagatcagtcctatgctagtctccaagctatcattctggggtccaagaacaaccatttgttcagattagctgtcattgtggttttttccagtctggtcctgacccttttgctcatcactcctccctctctgcaactggattccagagtacagctcagtgtttacctgtgggtatccacctctgcttccatcagctactggatgaaggctctaggatagcatataagatagtaatcaatctcattatcaaagaaggccatttaatgtagcctgtcaaccactgcttagattgttaggtggggacaaactcatagatatttgaacatttccctagtgccagaattctctttgaacctataatggctccctctattatggtatctcttttcttgttctcctcaattcttcccctgactaaattatcctgctctctcacgtctgcctatctcattctcttctcccactctctttcttctagatgcttctccccttccccatactcccaattagttcaggagatcttgtcctcttccccttttctgggggaccatgcatgtctctcttagtgtcctccatgtttccgaacttctttggtggtatggattgcaagctggtactcctttgctctatgtctaaaatccacatatgagtgagtacataccatttttgtctggttttgactgggttacctcactcaggatggtttcgtctagttccatccattttcctgtgaacttcaagattccattctttttttcccccactgagtaaatgtgtaaatgtgccacattttctccatccattctttatttgaggggcatgtaaggttgcttccaagttctggatattacaaataatgcttatatgaacatggtttagaagatgtcctccttgtaagaatgtgcatcttttgggtatatgactaagagtggaattgctgggtcttgtggtagactgagtcccattttcctgaggaaacatcatgctgatttccaaagtgactgtaggagttggcactctcaccagcattggaagagtgttcccctttctacacatcctatccagcataagctgtcattggtgtttttgattttagctattctgataggagcaagatggtatcacagaggtgttttcatttgcatttccctgatgactaaggacattgagcactttcttatgtgtcttttaggcattttagattccgctattgagaattctcaaagtagttctttaccctcctttttaattagattatttggtgttttgttaactagcttcttgaattgtttgtgtattttggaaatcaggcctgtgtcagatgtggggttggttaataacttttcccattctgtgggctgccttttttgttgttgttgacagtttcttttgccttacaaatgcttctcagtttcaggaagtcccattcattaattgtcaacctcagtgtctgtgctacggatgtaatgttcaggaagatgtctcctgtaccaattcattcatgggtaccacctacttcttttctaagaggttcagtgtggctagatttatgttgatgtctttgatccatttgaacttaacttttgtgcatggtgatagatatgtatctatctgcagtcttctacacaccagcatccatttatgccagaaccatttactgaagatgctttctttttcattgtttaattttagcttctttgaaaaattcaggtttttgtaagtgtctgagttaatatagagtttttcaatttgattccattggtctacttgtctatttttgtgccaataccaagctgttttcaggactatagctctataatagaacttgaagtcagggatggtgatgcctcctgccattcctttattgtacatggttgttttggctatgctggttcatttggctttccatataatgttaaaatgattctgtcaaggtctataaaaaattgtgatggaattttcattgggattgcattgaatctgtagattgcttttggaaaccttaccatttttactatgttgctcctacacatccaagagcatgggagatctttccattttctggtatctttttaaaatttctttctttatagactcaaagttgttttgatacaggtctttcacttgtttgcttaacattactctatggtattttatgttatttgtggacattgtaaatcatgatgtttctgattttgttctcagctcatttatattctgcatatagcagggtattgtttttttaagttactcttaaaacctgccactttgctgaagatgtttatcagctgtaggagttgcctggtagagttttcaggtcacttatttaaactatcatatcatctgcaaatagtgaaagcttgacttttccttttccaatttgtatacccctgatctccttttgttgtctaattgctatatctagaacttcaagtacaatattgaagaggtatggatagagtggacaaccttccttcctgattttacaggaatcatcttgagtttccacccttttagattgatgctgcctgttggtttactatatgatgcttttattaggtttaggtatgttcctgttattactgatctctccaagagctttagaatgaattgatgttgcattttgtcatatggtttttcatcatctggtgagatgatcatgtgatttttatatggtggatggattgcattgatggattttcttatgttgaaccatccctgtgtccttgggaagaaacctacttgatcatggtggatgatttccctgatctgttcttggatttgatttgccagtattttattgagtatttttgcatcaatgttcatgagagatattggtctgtagttttctcttttagttgtatctttgtgtgacttgggtaccaaggttatgaagtctcataaaaggagtttgtcaatgacccttctgcttttttgtgcagaaaactttgaggagaattagtattgactattctttgaatttctggtagaattctgcactgaatccatcaagttctggcctttttatcttgttggaagacttttgatgactgcttgtatttcattatcagttatagatctatttaaattgcttatctgtttttgatttaacttttgtaagtgatatctatccagaaaattttccctttactttagactgtcaaatttgaagagtacaggttttcttttcttttttttaatgttctagtgacttttatttctatttgtttttgcatgtagattcattaacaggattcttaattgtaaattaattctggtagcatttctttgcaaactattatgactaattcttattatttccagcctcagaaatataatcaacaccctagatatttggtcatttgtgttaccatctgaaactcttaatttttttttcatgacaatccaatttaatagccatgaccataaacccataaaaattttaagtttaatttcaatggaattaagaaaaatttattggttatgcttccagaattatctgcattgtttaggaccatctttttatggcttttgttaaaagtttgcaataaaaggggtttagtgtctttgaagactaaattatatgtacatatttgaatatgtatttccaggtaattcaccattaagaaatattaagcttctctttatacttgcttgaaattttgttttatttttttagttatttttcatgtgaattagaaacaggattgttttacatgacaatcccagttttcttctcccacctgtccttccctacgcccccttatctaaaaccttatttgtcacacatctttcctgctccccctggatggtggggccttccatagtgtgtgataagagccttttgtatcctttgggatagggcctaggccctcacccgtgtgtcatggctgagggagtattctacatggaatgggctcccaaagtccacacctatgctaaggataaatactgggcttctacaggaggtcccatagatttctgaggtttcctcagagaaacccatattcctggagtctggatcagacccatgctggtattccagctatcagactggggagcaagagttcctgtattttcaggtcagctgtttgtttttccccagccttgtctggacctctgtgctcttcactgggccttctctgcatctgggttccaattcagatcggtgattagttatgagtgtctgcttctacttccaccagctgctggatgaaggcaaacaagtcagtcatcaatctcataatcaggggagggaaattaagcctctcctccattgctgagattgttagctgatgtcatctttgtagatctccagacatttccctagtacctgatttctctgtaaaccaaaaatgtctccctctattatgatatctccattctttttttttaaattttttttattagttcaagttagggaacaagtttgtttcacatctaaggcccttctccctctccctcccctcacccctatccctcttctcccaccctaacctaccccccaacccatccaccgaccactccccaggcagggtaggaccctcaacaggggctctgcaaagtgcaccaaatcttcctgtgctgggcctgggcccttccccatgtgtccagggccagagtgtatcccttcacttgggatgggctctaacagtcccttcttataccacggaaaaatgctaatccacttccagaggctccctggagtgcagaggcctccttatccatgttcagggggctggatcagtcttgtactggcctccaagatagcatctggggtctatgtgctcttccttgtccaggccaactgtttctgtgggtttctccaacatggtacagaccccttcgatcttcattcatccctctcttccactaaattctaaatttcagctcagtgtatttctgtggatgtctgtctctgcttccatcagccactggatgagggctctaggatggcataaagagtagtcatcagtctcattttaggggaagggcttttaggttatcctctcctccattgcctggattgtcagatcgtgtcatccttgtaggtctctggtgatctacctagttccagatctcttttcggacctatattggttccctctaatatggtatcactaatcctgctctctctcctctattcttcccccaactcaatatttctgttccnnnnnnnnnnnnnnnnnnnnnnnnnnnnnnnnnnnnnnnnnnnnnnnnnnnnnnnnnttcaggagttcatgccacttccattcctggggaccatttatcccttagagtccttcatgtttcctagtttctttggtgaagaggattataggctggtaatactttgccctatgtctaaaattcatatatgagtgagtacatagcatgtttgtcttttttgtgactgggttacctcactgaggatggtttcttctagttctatccactttcctgcgaatttcaagattccattgctttttttgctgagtagtactccattgtataaatgtaccacattttctctatccattcttcagttgagggnnnnnnnnnnnnnnnnnnnnnnnnnnnnnnnnnnnnnnnnnnnnnnnnnnnnnnnnnnnnnnnnnnnnnnnnnnnnnnnnnnnnnnnnnnnnnnnnnnnnnnnnnnnnnnnnnnnnnnnnnnnnnnnnnnnnnnnnnnnnnnnnnnnnnnnnnnnnnnnnnnnnnnnnnnnnnnnnnnnnnnnnnnnnnnnnnnnnnnnnnnnnnnnnnnnnnnnnnnnnnnnnnnnnnnnnnnnnnnnnnnnnnnnnnnnnnnnnnnnnnnnnnnnnnnnnnnnnnnnnnnnnnnnnnnnnnnnnnnnnnnnnnnnnnnnnnnnnnnnnnnnnnnnnnnnnnnnnnnnnnnnnnnnnnnnnnnnnnnnnnnnnnnnnnnnnnnnnnnnnnnnnnnnnnnnnnnnnnnnnnnnnnnnnnnnnnnnnnnnnnnnnnnnnnnnnnnnnnnnnnnnnnnnnnnnnnnnnnnnnnnnnnnnnnnnnnnnnnnnnnnnnnnnnnnnnnnnnnnnnnnnnnnnnnnnnnnnnnnnnnnnnnnnnnnnnnnnnnnnnnnnnnnnnnnnnnnnnnnnnnnnnnnnnnnnnnnnnnnnnnnnnnnnnnnnnnnnnnnnnnnnnnnnnnnnnnnnnnnnnnnnnnnnnnnnnnnnnnnnnnnnnnnnnnnnnnnnnnnnnnnnnnnnnnnnnnnnnnnnnnnnnnnnnnnnnnnnnnnnnnnnnnnnnnnnnnnnnnnnnnnnnnnnnnnnnnnnnnnnnnnnnnnnnnnnnnnnnnnnnnnnnnnnnnnnnnnnnnnnnnnnnnnnnnnnnnnnnnnnnnnnnnnnnnnnnnnnnnnnnnnnnnnnnnnnnnnnnnnnnnnnnnnnnnnnnnnnnnnnnnnnnnnnnnnnnnnnnnnnnnnnnnnnnnnnnnnnnnnnnnnnnnnnnnnnnnnnnnnnnnnnnnnnnnnnnnnnnnnnnnnnnnnnnnnnnnnnnnnnnnnnnnnnnnnnnnnnnnnnnnnnnnnnnnnnnnnnnnnnnnnnnnnnnnnnnnnnnnnnnnnnnnnnnnnnnnnnnnnnnnnnnnnnnnnnnnnnnnnnnnnnnnnnnnnnnnnnnnnnnnnnnnnnnnnnnnnnnnnnnnnnnnnnnnnnnnnnnnnnnnnnnnnnnnnnnnnnnnnnnnnnnnnnnnnnnnnnnnnnnnnnnnnnnnnnnnnnnnnnnnnnnnnnnnnnnnnnnnnnnnnnnnnnnnnnnnnnnnnnnnnnnnnnnnnnnnnnnnnnnnnnnnnnnnnnnnnnnnnnnnnnnnnnnnnnnnnnnnnnnnnnnnnnnnnnnnnnnnnnnnnnnnnnnnnnnnnnnnnnnnnnnnnnnnnnnnnnnnnnnnnnnnnnnnnnnnnnnnnnnnnnnnnnnnnnnnnnnnnnnnnnnnnnnnnnnnnnnnnnnnnnnnnnnnnnnnnnnnnnnnnnnnnnnnnnnnnnnnnnnnnnnnnnnnnnnnnnnnnnnnnnnnnnnnnnnnnnnnnnnnnnnnnnnnnnnnnnnnnnnnnnnnnnnnnnnnnnnnnnnnnnnnnnnnnnnnnnnnnnnnnnnnnnnnnnnnnnnnnnnnnnnnnnnnnnnnnnnnnnnnnnnnnnnnnnnnnnnnnnnnnnnnnnnnnnnnnnnnnnnnnnnnnnnnnnnnnnnnnnnnnnnnnnnnnnnnnnnnnnnnnnnnnnnnnnnnnnnnnnnnnnnnnnnnnnnnnnnnnnnnnnnnnnnnnnnnnnnnnnnnnnnnnnnnnnnnnnnnnnnnnnnnnnnnnnnnnnnnnnnnnnnnnnnnnnnnnnnnnnnnnnnnnnnnnnnnnnnnnnnnnnnnnnnnnnnnnnnnnnnnnnnnnnnnnnnnnnnnnnnnnnnnnnnnnnnnnnnnnnnnnnnnnnnnnnnnnnnnnnnnnnnnnnnnnnnnnnnnnnnnnnnnnnnnnnnnnnnnnnnnnnnnnnnnnnnnnnnnnnnnnnnnnnnnnnnnnnnnnnnnnnnnnnnnnnnnnnnnnnnnnnnnnnnntgcttaaggtgtttagcagctttaggagttccctggtagagtttttcatgtcactattgtagactatcatgtcatctacaaatagtgaaagtttgacttcttc

SEQ ID NO: 35 - DNA, 299915 bp, Cricetulus griseus
  modified_base (13250)..(13534): a, c, t, g, unknown or other
  modified_base (13911)..(14388): a, c, t, g, unknown or other
  modified_base (14737)..(14802): a, c, t, g, unknown or other
  modified_base (15246)..(15845): a, c, t, g, unknown or other
  modified_base (16787)..(17421): a, c, t, g, unknown or other
  modified_base (18086)..(18095): a, c, t, g, unknown or other
  modified_base (21804)..(21813): a, c, t, g, unknown or other
  modified_base (26981)..(28006): a, c, t, g, unknown or other
  modified_base (28248)..(28369): a, c, t, g, unknown or other
  modified_base (31491)..(31713): a, c, t, g, unknown or other
  modified_base (56827)..(57662): a, c, t, g, unknown or other
  modified_base (57859)..(59029): a, c, t, g, unknown or other
  modified_base (151817)..(151913): a, c, t, g, unknown or other
  modified_base (152822)..(152840): a, c, t, g, unknown or other
  modified_base (157086)..(157160): a, c, t, g, unknown or other
  modified_base (157291)..(157378): a, c, t, g, unknown or other
  modified_base (161790)..(161817): a, c, t, g, unknown or other
  modified_base (175685)..(175697): a, c, t, g, unknown or other
  modified_base (199034)..(200558): a, c, t, g, unknown or other
  modified_base (219251)..(220607): a, c, t, g, unknown or other
  modified_base (228162)..(228171): a, c, t, g, unknown or other
  modified_base (228773)..(229720): a, c, t, g, unknown or other
  modified_base (243173)..(243327): a, c, t, g, unknown or other
  modified_base (288565)..(288820): a, c, t, g, unknown or other
  modified_base (289272)..(289303): a, c, t, g, unknown or other
  modified_base (289625)..(290055): a, c, t, g, unknown or other
  modified_base (290441)..(290553): a, c, t, g, unknown or other
  modified_base (290691)..(290700): a, c, t, g, unknown or other
  modified_base (290963)..(291039): a, c, t, g, unknown or other
  modified_base (291549)..(291611): a, c, t, g, unknown or other
  modified_base (292019)..(292222): a, c, t, g, unknown or other
cggtcatcaggaaccatggaacctgcaatctacagccacactgccctggatgcacccaatctcatttgatctcagaagttaagcggagtcaggcctggttagcccttggatgagaaaattctcttttttctgattgaaaacataaattttactgatggacctccatccttcctaaagcactggcattgcatctgcagaatagggtctgtcaatccactgacagcttgggattagcaattctttattgtggtacttgctataagcactgaagaatgtctatcagtgttcaggcttcggtatccacaggccaatagccctgtccaggtagccttaagcaagttacctgaattcccagagtctcagttttctgataatacaatattcatcccctggatgactgtggagatttaaaaataagatataaaaatcgattagcatagtgtcaccaggtagtatgcacagaatccatcttagctgcttttcatttgggtttgagtagtatacattacagaattgagctaaaatattttcatgtctttcttggccagtttcccaaatcagagtcctctttcaaatttcatttaaggtaaaacacaaattcagtggcattttatagctatcctagcaatatttattcctaaaataagaaaaaccaggaaggatgacccagagaagagagattgatactgtaatgagtattgttccattttagtgtataataccctactcttgcacccaatctcatttgatctcagaagttaagtggagccaggcctggttagcccttggatgagaaaattctcttctttctgattgaagacataaattttactgatggacctccatccttcctaaagcactggcattgcatctgcagaatagggtctgtcaatccactgacagcttgggattagcaattctttattgtggtacttgctataagcactgaagaatgtctatcagtgttcaggcttcggtatccacaggccaatagccctgtccaggtagccttaagcaagttacctgaattcccagagtctcagttttctgataatacaatattcatcccctggatgactgtggagatttaaaaataagatataaaaatcgattagcatagtgtcaccaggtagtgtgcacagaatccatcttagctgcttttcatttgggtttgagtagtatacattacagaattgagctaaaatattttcatgtctttcttggccagtttcccaaatcagagtcctctttcaaatttcatttaaggtaaaacacaaattcagtggcattttatagctatcctagcaatatttattcctaaaataagaaaaaccaggaaggatgacccagagaagagagattgatactgtaatgagtattgttccattttagtgtataataccctactcaagattggaaagatgggacagcagtctaagtaaatgaagaagactgacagttttcctaaaatgatttgtgtgggggcttgcacacatgtgtgactactcatgaatgcaggtgtggaaagtggaggtcagtgttggatgcctgtagggagagacccctacacacctgtggcgctgaccacacctgtttgggtgtggccacaggtatgtaaggggcatgtgggataaagtttagaaaagagggggcacttcgctctctcactggttctggtcaggtttggagagctgttgagtcaaacctgggtcttcggatcctcacgtaagtgacttacccttagtaaattaaccatctatatccgtattccgtgtatggttattttcctctacaggtgcctaccttttttctctccaccttactttattaaaaatgctttttattgaaataaaataacattttcccactctttttcctccctcctgcccttcccagttattctctctttagcctctcccatatccccccacgctcaagcagatagtctctctttgattatgtttgttacatgtacacacacacacacacacacacacacacacacacacactgattcaggtagactggatggctagtgatcccagggatcctcctgtctctggatccctggaattgcaagcgcaaactgccatgcctggctttttacatgggtgttggagataaaaacccaggtccttgcttgtaaagcaaacactaacccactgaggccctaaaatgaacctgtacagaccattctccttagacagaatcttaaaagaatactgtacttcttttgcattcaataacaaagaatatcagaactctgtagtttaaagtgtatacctaaaattttagttgttctaaaagatagtgtattctgaggccagtggtaaggctcagcagttaaggacacatggagcaaggtttgagtctcatcccccacatggtagctcataattatctagaactccagctccaggaaatctgaaaccctcttcaagtctccagtgtgcatcagatacatacatggtacacacacatacatccaggcaaaacacttatgcatacagaaataaatatatttttaaagtgtattcctaaagctttcgttgggctaaaccaaggacaagttgttgcccttaaagagtgaatctctgagtgtttgtgcttttgagtagatcaggttttctctcttccttcttcatcatctctcatcccccacacaaaacctggagtcactgaggttgtgagttattttttttctcttaaggtatatcaacacacaaaggagaaatgcccaactagagtaaataatttgatagactgtcttggataaaatattaattttcagtacctgataaatgaatgatggcagtggtttataatgtgattggagcattacttagataaaagaataaagaagggtatgtaagtctctggtgatgataaatggcagcctatcaacttagaagaatccatccaggaacacaacaaaaagatcagtattaagtcacagcatagggtctagcaagaactgaacgtttgtttctttcagtttgtattaaaattgtaagcctcaagatgaccacatcatctttgggaggtaataaagttccagtttatgccactgtgggattagtgcccccaaactgaggtcccacagggcttcttcaccactgccatcatatgaggctacagtgagagaaagttattaaggaaataggtccatagataccaagtctattggcacctcaacctttggtttccaggcttctgcaactgtgagaagtaaatttctgggttttttggttgtttatttggttgattggtttggtctttttttttcttgttgttgttggtagttgatggtgatggtggtggtggtactaggaactattgaacgtaagacctgcatcttcaagacaagctatatgtctagcccatatttttgctggttttttagaggtagtttgaagtattttgtcatcatgaatagagcaagaaatgatcttaacaatacatattgcaaatgtcatcattctaaacacttatgcttattcccacagagaaacttattttggagaggtcaaagaccattacagagatccacattagtcataatgctaagatcaaatgacaatgggtttcccattcccagctcacacatgtatggatcaaggacatatatataaaaggggacaaaggattgtcatagccaaagccctcagacacttattgtgagataatttcctctataaaaagaaagaggacatgaaatgaggtggacatagaggacggagtagatctggaaagaggtagggactgaatgtgatcaaaatatgttgtgtgaaattctcaaaaactgataaaatattatattatttaaaactttaagagacattgactggctaggtactaggaacagaagaacagataaggatatggagtaaatgggtttgtgaaaaatagcaatattaagaaataaagaatgtcaaaacgggaagatgaagtctaatatatttggaaataagttcattttcaaacccctatatttaattccatcccattaataattcagcacagctgggaaaagcatttggatgagagtagtacttaaagagatttaaatatgatcatgatgaagccaaaaaaaaggtagatatgagtttgccaagtgaacctggaaatattgctaatgtcatctgggccacagattctgccagccatggacatggagataagttatttaaacttgctttttctttgttctacggtatctgttccttgcatgaaaatcttagtcaaaaacttgaagtatattatatcagtgactgtaatggccaatcttcattgttagcttggccagtttgagaatcatatagcagacatgtctttgtgtctgtgtgggtgtttctagaggcagaataattaaggagaaagaaggaatctagctttctgtcagcattcatctctctgttcctgactgagggtgcaatgtagccagccaactcatgcttatgtcaatatgccttccctcttcttaaaccaggagccaaattaaacctgcattgcccagagttgctttttgttggtattttgttagagaaaagataagaaaggcaattaatacagtacctaagcaaagcatattatatatgcagtgaataatgaatacaaaattgaaagtgtccctttaaaacttgtccagatgctatgtcttccctcttcttaaaccaggagccaaattaaaccagcattgcccagagttgcttttggttgggtattttgttagagaaaagataagaaaggtaattaatacagtatctatgcaaagcatattatatatgcaatgaataatgaatacaaaattgaaagtgtccctttaaaacttgtccagatgtggcgattgactgaggaaagagtgccttctggacactgcagagcagctgcacatgtgaactcacagaaattgtaacagcacaccacagcctgtgaaagcccaggacatatcccaacagggagaggggagttgtcatgaagttccacacctggaaattgctattggcagttgttaagtactgggagagtgagagtaaatttctttagtgtgcaatcctcgatagactgaccacactccaatgggcagtacacactgaacttagtattgttttattttgttttgtttttctttatttttaaagagggcacaaagccaaaccagtggacagagggagtagatctaagggaggataggatagagacgaatacgctaaaaatgaatgaaattcttaaagaatatgttataatactgtattaatccaagttctctagagtaacagaacttatagaaagaatatatagatatagatatatagaaagagaaaagggatttattagaatgactaacaggctgtaatccagctaaactaacaatttctagctatgaaaatagaaggttcagtaatccagtagttgctcagtccatgaggctgggtgtctccgctggtcttcagtatatgctggaatcttgaagacataggttctcatggcgttgagggaatggacttgctagtgagggcaagagcaagcagtatgctggaatcttgtgaacgtaggttctcatggcgttgagggaatggacttgctagtgagggcaagagcaagcaggcaaagagtgaggctttcttcttccatgcactttatataggctgccagcagaaggtgggatccagattaaatgtgcgttttcctacccaaaaagatctcggttaaaggtgtaccttcacacctcaaggtttcagattagaaaaggatcttcctacttcaagtgacttaaataagcaaagttccctcgtaggtgtgcttagcccttttgggattttagttaattccagacatagacaaactgacagcaaactagccctcacaaatattaacacattaatattgcatgttatctataaatttaaatatatatgaacttatcaattcaggttaaagtattgtgttaggcacagcaatggcaaaaatcaatagtaatggaagcatgatgaatgagttcttacccattcagagatcaaatttgagttaacaaaacaggtatttccataaaatggtttgaatttatgtagcaagtaagtttaacattcttcagggacaaaagaaatgggggcagtcagtaattgtagggaaatattaagggaaagaacttacagaaagtcctttaaataaaacatagacagataaaggacacttagaaggtagattgagacttttaaggagattgagggaacagatacgtgagaagtgggtaggccacacacacacagagttcaggatgaagggcagatggaggtcagcccagacaagggaaagacaatgacaactggagagacaatctctcagacaaatagcagaaagaatgttctcatgggaaataccagaacagctcttaaaataagaacaccataattttcatagtcaaaaagggtttgcacttggaaaaaattattgatttacactgtacttctgtactttattataaagcccaattctataacttcagcaatagcagatgataaagcagcttaatacagagaaacagtagagagtagaggagaaacatgggtttaggacaaggggtgggtggatactacctctgggcaactagattttcagagccagtgtttgtgtcttctaaaaatagagaatgcttggaattatattcctaaaggatatatctccatcaaatccctcccactagcgatcagaaaacccacagaagaggatgcagaaagagtaaaagccagagggggtggaggacaccaaggaaacagggctggaaatcaatggggtctatgcacataggcactcacagagactgacgcagcatgcacaggacctacacaggtctgcaccggatgggttcctagagctttaaggaggaatggacacatgcacccatccttaacccaaaagctataacagttcctttttcataatgccatgtcagagtttttttttatctttctctccctctttttaaattttacctttttaaattttaacctttctttctgttttttactctacaggccctttgcatattatgttgtatattatggcttccagttttgcatttttatgggattcctgagtgtatgaattagtgggtctctgcatctgtatttgtttcttatgccctttcttgggctcttttccttctgtttgtttgatcctattcaattgtatttgtttttgttttatattactatattttattttagagagaaaaattcttgaaacaggttatgtagtaatgcagtttataaggcttttgatatagtattattaatatagtaagtgttcaatgactagtatttgttttactgtgttataactatttctaaccacttgatgttggcattaactaggaaaaaattaacatcatagaaattattgtgaatttctctcatcttccaaatgcttgggtttttcttcaagaatgaaatgatcactaacattcattaactatgttagtttaagaaacattgaatttgataccatggtatctaaaaaaaatttttgcctttgagaaaaagttttattacttcttttattttttacattataatataatgacattgtttcaagctgggtgttggtgtcacacgcctttaatcccagcactcgggaggcagaggcaggcagaactctgtgagccaggataggctccaaagctacacaaagaaaccctgtctcgaaaaaccaaaaaaaaaaaaaacaaaacaaaacaaaacaaaaaaaccacaagacattgtttccccatttcctttcccccatccaagccctccaatataactctccttgctttctttcaattcatggcctcttttttaataatttctgttacatgaatttatagatgtatgtgtatattagtaccctgctcagtctgtataatgttactagtatgcatattttcagggttgactatttggtattggataaccagttggtgtactcttcctagggtaatattatttctcctgctctcaccattgcttagttgcctgtagttcttggtgtagggctgaggccttgtggattttctcctatccactggcatgtctattgttgtcgtccttgtttagctcatgttttggagccatgttggtgaggctttatgggtgttgttttgacattactaggagacaactctgaatcctcttactcttataatctttatatctactcctttacgatgttccctgaaccttagtgtcaggaatgttttatagatatatctgttgggactgtggctccacaattctgtattttgattgggtgtggttttctgtaatggtttccatttattatgaagagaagtttctttaatgtgggaatgaggactatacttatctgtgggtatgaagacaaatatttagaacatagttaaggtgttatgctggtttggagaaattgatggttgtaggttcttctccaagatccatgtcttcattggccctaggcatatacttctctgatactcagatatgatcaatcattttgtccatgtcactgtgattttcctcacttgaggtaaatgtagtctgacatattgattatttattcttggctatgggatgagattttgctcatattgatctaactgtttagggatgtttgtttatatagatgtcatatgatgcctcagaaaggttatggttcaaagcaagatgcaaccccactaaattatgcactactatgttttgcacatccaataggaaaggagctggggctctgggtctgccctaggaagggcttccctcctaccttgtgcaggggtattgagtcctgttgaaaaacctggctctgtccaactaaagtaactctccttaagaatatttgctgtatctttaacttaattttttgagtctataatttacatgtcatacactgatttgttttaagattacaattgaacagtttcttcaagtttactaaattgtaccatcaccaacacaatctgtcttggggttacgtctgtcatctcaataagactcctcgtgtccatttatggttagttctcgttcccattcactaacttgtgcaacaactgtctacttcatgtccccagagatttgtcatttatatgcgttttgtataaatgggaatgcatattaataatgtatcctttatgtctagcttccttttgtattctttggtagtttcatatattcatagaacatttgtagatcacacccatcctccactctcctctacctccttcaagccccataactgtctcagtgtagcagttttgataatcactcatgctggtcatgcctcagcatgttgttgacaagttgtactcattacttatacatgtgggtggctttctggatactatgaatagtgtatcaatttctttttaggatatatattttcatttcttttgaatgaagacatggagtggaattgttaggtcatattgaaactctagtttttgttgttgttgttttggggtgtatatgtgtgtgtgtttgtgtttgagaaagggtttctctgtgtagccctggctgtcctgaaactcactctgcagattaggctgacctgggaactcaaagatatctgcctaagtctgactcccaagcgctgggattaaaggcatacactaccactgcacatctgtaactctagttttaacatcttaagaaactggaaaactgttttcaaagtggctttagtattttgtattctgattactatatgagggctctgattgtcccatctttgtcaacatattttactgtatttcttagagttaaagctttttgtaacagaacaaaatgatatatgatttctttgttttagtttgcatcttgctattgacaaatgttaaatttttaaaattattttttttactttattgtgtgtatgtgcatgtgtgtacatcaaatgaaaacttgtgtgagttgattctcttcttcatcatatgtctcctacaacccatctcactggtctgatgatgttaaatatcttttcttgtagtttttagcgaaaggttttcattgttcttggtgaaacatttctcaattttttgcccaattttaaattgggtatttatccttcatcattgtgttgtaaagcttgtttatattttctttgtagaaaatattttatcgggtaaattaaattatttgtaaatattttatcctactctgtaagttgtcttaaactttgttgatcatacctcatgaagtataaaagtttttgattttgatgaattctaatttccattttattgttcatgatatttgatattgtatcagaaatctttgcttgacttcaaactctcaatttttattatgtaggtgtgcttgtattatgtgtgtgtgtgtgcttgtggtatacctgcatgtgggtagagtccagagaataatggagtgtcattgttcagaaaccatccaccttggttttttgctcgttttgttttgtttttgagacagggtctcgcattgacttggagctcattcattaggtaaaactggctaaccaatgaataccaagtgttttcctgttactacaccaccataaaaagtgttcactacatggattctggctatcaagttcagatttttatatttgcacgcaaatacttttttgactgagaaatctatattctttttgtaattatttttatttatttcacataagcaaccacaagttcccctccctcttctcctctcattcccttattccacctcctttctatgcctaccatccaaccctcagaaagggtaaggcctcccatgggaatcaacaaagagttgattccatatcagcactgggctgagctcctctttctcttcagcttgactcctgcatctcagcccagtgcttggctgtggatctctgcatctgcttccatcagatgaaggttctgtgataactattagggtagtcaccaatctgagtacaggagaaggccagttcaggtaccctctccactattgctaggaattttagctggggttatccttgtggattcctatgagtttccctggcaccaggtttctccctaaccccaactctgccattccaatgcctcaagttcccatcctccattccacccctttaccccccaaccccaccaattcccagtttatccaggatatatcatctgtttccccttcccagagtgatccatgcatccctcttagggtcctacttgttacctagcttctttgggactggagattgtagcctggttatcttttgctttaatataatatgcacttatgagtgagtacataccgtgtttgtctttctggggctacatttacctgactcaggatgatttttctccagttccatctatttgtctttgaagagaaatctatagtcttagttcatacatttagctctgtcgtctgtttgggattatattttaaataaggtatggaatgagtctatgttctctcatagtttaggatatacagatgtcttagtgtcatttgtcaatgaggtggttatcaaccccattcaattgccctgactcctgtgttgattgccaactgatctgaaacattaagagtttatttcaagatctcaatcctgttctgatgagttctatgtccatctctgtgccattgctacactgctttagtaagatttcagagttgatggaagcttaaattaagagactagaagtcatggctggatttactttgcattttgaaacttcagaaaatacatcagttaataaataactaaatacaagaggataggaaattacttacaaaaaatcctaaagtagagagaagtgaagcagataatattacataacctctacattgctggctcttaatattgtcactcaaagcttgccaacaatgaagaaaagaataggaagatgtccataaaataagtttaataaaattgtactaaattccttaggtatacacaactacttttgtctcttgcactttaggggatttttcctgtgctcatgaaactggggataaatattataaaaaacaacacccttctttgaatttttgctgttaatgaaccatttacattgcaaatttttcttgacatatactgtattaaaatctttatagatctcaaacaaaagatatttgccccaaatttggctgaacttgatgtagatgttttactactagccattgtctcataaattttatttttttaaacactgatctaatgagctgggtgccaaaaatggcattttccttctggtatgagcatgccttctagctatgacaagtaggctggactcaccaaatctcatcagcatggctgactaacccctggttggttatccaatgctaagtggtcagctctggcaacatacctcttcattgaagagcagactcagcaggctgtattccatgtttgttcctttatagaaatatgtaacagcaatggttaaagaagaggtgtcatggatttgggatgagctgggaatgcagacaggaaggtatgtaaggaaagaaagggagaggggaaaatgatataattatatttttaattaaataaaaacaatttaaagtacagtgacactatgacctgaattaaaataaaaatttctattaataataaactcaagcaaataagaagcttgataaagttgcttacctagttcagataactaaccccattccttactgatagaattaaagaaaacctattcttccaaggcagtcaaattataaaaccagagaggcagcccggcctccatccgccggcccagataggccaggagctgtttctggctcctgttcatcatcgctgctcagtcatctgacacaagagacctgctgcagcggtgggatcctacacaccaaggcccagtgacagctctgcccccaactgctggcccggcaggacccggcacgccagaacactgccgacacccgagtaacagtgacacctccattcacgagaagaggaccaatatcagagtattggatctgtttgaatctaccagaagagaacctttgtcccacacccaccaggagaaaaagaaactcttgctacacccaacagaagaaaggatgagaagaggacaaggtaaaagcacattcaacaacaaaaaactcaatatgacacctccagagaataggatccatacaccagcaagacctgaacatcataacacagttgaaccagaagaaaatgaccttaaaaacatcttcagaaaaatgatagaggacctcatagaggacatgagaaaattccttaaagaaatggaagaaaaaacaaaccaaaaaaatacaagnnnnnnnnnnnnnnnnnnnnnnnnnnnnnnnnnnnnnnnnnnnnnnnnnnnnnnnnnnnnnnnnnnnnnnnnnnnnnnnnnnnnnnnnnnnnnnnnnnnnnnnnnnnnnnnnnnnnnnnnnnnnnnnnnnnnnnnnnnnnnnnnnnnnnnnnnnnnnnnnnnnnnnnnnnnnnnnnnnnnnnnnnnnnnnnnnnnnnnnnnnnnnnnnnnnnnnnnnnnnnnnnnnnnnnnnnnnnnnnnnnnnnnnnnnnnnnnnnnnnnnnnnnnnnnnnnnnnnnnnnnnnnaaacaaaaccaaaaaaaaaaccttccccaaccaaaagaaagacatgccaatgaaaatacaagaagcctacagaacaccaattagaatgacccaaaataaaacgtcacctctccacataataatcaaaacaccaaacatacacaacaaagagaaaatattaagagcagcagaggaaaaaggtcaagtaaactataaagccaaatctatcagaatgatacctgacttttccttggaaactctgaaagccagaaggtcctggatagatattctgcctacactaagagaccatggatgccagcccagactactatatccagcaaagttttcaatcattatagatggagaaaacaagatattccataacaaaaccagattcnnnnnnnnnnnnnnnnnnnnnnnnnnnnnnnnnnnnnnnnnnnnnnnnnnnnnnnnnnnnnnnnnnnnnnnnnnnnnnnnnnnnnnnnnnnnnnnnnnnnnnnnnnnnnnnnnnnnnnnnnnnnnnnnnnnnnnnnnnnnnnnnnnnnnnnnnnnnnnnnnnnnnnnnnnnnnnnnnnnnnnnnnnnnnnnnnnnnnnnnnnnnnnnnnnnnnnnnnnnnnnnnnnnnnnnnnnnnnnnnnnnnnnnnnnnnnnnnnnnnnnnnnnnnnnnnnnnnnnnnnnnnnnnnnnnnnnnnnnnnnnnnnnnnnnnnnnnnnnnnnnnnnnnnnnnnnnnnnnnnnnnnnnnnnnnnnnnnnnnnnnnnnnnnnnnnnnnnnnnnnnnnnnnnnnnnnnnnnnnnnnnnnnnnnnnnnnnnnnnnnnnnnnnnnnnnnnnnnnnnnnnnnnnnnnnnnnnnnnnnnnnnnnnnnnnnnnnnnnattctcctgtggtggtcttatcagaccaccatgctttaaaattagagttcaacaacaacatgaaccacagaaaacctacaaaccatcaggatgaagtctcaattctgaacatttatgccccaaatacaaaggcatccacgtttgtaaaagaaacattactaaaactcaaatcacacataaaaccacacacacttatagtgggagatttcaacaccccactctcaccactggacaggaacaccagacagaaacttaacaaagaaacaaaagaactaatagaagttatgtcacaactgtatttaatagatatctatagaacattccacccaaatacaaaacaatttacctnnnnnnnnnnnnnnnnnnnnnnnnnnnnnnnnnnnnnnnnnnnnnnnnnnnnnnnnnnnnnnnnnngaaaccacccccccccccgtgtcttatcagaccaccatgctttaaaattagaattcaacaacaacatgaaccacagaaaacctacaaactcatggaaattaagtaacacccaattgcacagttcatgggtacaggatgaaataaaaaaaaagaaattaaagatttcctagaattcaaatagaatgcggacacaacatatccaaacctatgggatactctgacagcagtaagaggaaagttcatagagctaaatgcccacatgaagaaacaggagaataatcacactagagttaacagcacaactgaaagctttagaaaacaaagaggccaatacaccctggaggagcagatgccaggaaataatcaaattgagggctgaaatcaataaaatggaaactaggagaacaatacaaagaatcaatataacaaaaagttggttcttcnnnnnnnnnnnnnnnnnnnnnnnnnnnnnnnnnnnnnnnnnnnnnnnnnnnnnnnnnnnnnnnnnnnnnnnnnnnnnnnnnnnnnnnnnnnnnnnnnnnnnnnnnnnnnnnnnnnnnnnnnnnnnnnnnnnnnnnnnnnnnnnnnnnnnnnnnnnnnnnnnnnnnnnnnnnnnnnnnnnnnnnnnnnnnnnnnnnnnnnnnnnnnnnnnnnnnnnnnnnnnnnnnnnnnnnnnnnnnnnnnnnnnnnnnnnnnnnnnnnnnnnnnnnnnnnnnnnnnnnnnnnnnnnnnnnnnnnnnnnnnnnnnnnnnnnnnnnnnnnnnnnnnnnnnnnnnnnnnnnnnnnnnnnnnnnnnnnnnnnnnnnnnnnnnnnnnnnnnnnnnnnnnnnnnnnnnnnnnnnnnnnnnnnnnnnnnnnnnnnnnnnnnnnnnnnnnnnnnnnnnnnnnnnnnnnnnnnnnnnnnnnnnnnnnnnnnnnnnnnnnnnnnnnnnnnnnnnnnnnnnnnnnnnnnnnnnnnnnnnnnnnnnnnnnnnnnnnnnnnnnnnnnnnnnnnnnnnnnnnnnnnnnnnnnnnnnnnnnnnnnnnnnnnnnnnnnnnnnnnntcattgccaaactcttttatgaggcttcaataaccttggtacccaagcaacacagagacacaactaacaaagagaactacagaccaatatccctcatggacattgatgcaaaaatactcagtaaaatattggcaaattcaacccaagaacccattagaaaaatcatccaccatgatcaagtaagcttcatccctgggatgcagggttggttcaacttatgaaaatctatcaatgtaatccaccatataaacaaactaaaagaaaaaccacatcatcatctcactagatgctgaaagagcatttgaaaaaaactaatacctcttcacaataaatgtccaggagagatcagggataacaggaacatacctgaacataataaaaacaatgtatggcaaaccaacagccaatggtaaactaaatggagagaaactcaaggcaattcctctaaaatcaggctgtccactctctccatatctcttcagtattgtacttgaagttttagctgagcaataagacaacaataggagatcaaggggatacacattagaaaagaagaagaaaaagtttcactgttggcagtttacataagtgacccaaaaaactctacctgggaactcctacaactgataaacaccttcagcaaagtagcaggatacaatattaactgaaaacaatcagtagccctattatgtgcagaagatatatgggctgagaaagaaatcagagaaacatcaccctttaaaatagccacaaatgacataaaatatcttgaggtaatgctaaccaaacaagtgaaagacctgtatagaaagaactttgagtctttaaagaaagaaattaaagaagatactagaaaacggaaagatctctgtgcccttggataggcaggatcaacatggcaatcttgccaaaagcaatctacagattcaatgcaatccccannnnnnnnnnnnnnnnnnnnnnnnnnnnnnnnnnnnnnnnnnnnnnnnnnnnnnnnnnnnnnnnnnnnnnnnnnnnnnnnnnnnnnnnnnnnnnnnnnnnnnnnnnnnnnnnnnnnnnnnnnnnnnnnnnnnnnnnnnnnnnnnnnnnnnnnnnnnnnnnnnnnnnnnnnnnnnnnnnnnnnnnnnnnnnnnnnnnnnnnnnnnnnnnnnnnnnnnnnnnnnnnnnnnnnnnnnnnnnnnnnnnnnnnnnnnnnnnnnnnnnnnnnnnnnnnnnnnnnnnnnnnnnnnnnnnnnnnnnnnnnnnnnnnnnnnnnnnnnnnnnnnnnnnnnnnnnnnnnnnnnnnnnnnnnnnnnnnnnnnnnnnnnnnnnnnnnnnnnnnnnnnnnnnnnnnnnnnnnnnnnnnnnnnnnnnnnnnnnnnnnnnnnnnnnnnnnnnnnnnnnnnnnnnnnnnnnnnnnnnnnnnnnnnnnnnnnnnnnnnnnnnnnnnnnnnnnnnnnnnnnnnnnnnnnnnnnnnnnnnnnnnnnnnnnnnnnnnnnnnnnnnnnnnnnnnnnnnnnnnnnnnnnnnnnnnnnnnnnnnnnnnnnnnnnnnnnnnnnnnnnnnnnnnnnnnnnnnnnnnnnnnnnnnnnnnnnnacaagatccagcaattccactcctaggcatataccctaaagaagcacattcatacaacaaagacatctgttcaacgatgttcatagcagcactatttgtaatagccagaaatgaaagcaacctagatgcccttcaattgaaaaatagacagagaaaacgtgatacttttacacaatggtgtactactcagcagaaaaaaaacaatggaatcttgaaatttgcaggaaaatggctggaatgggaagaaaacattctgagagaggtagatatgtactcactcatatgtggattttagacatagagtaagggattaccatcctacagtccacactgccagagatactagtaaacaaagaagaccctaaaagagacaaactttgttccctggagaaggggaaagcatcaccattccctgagtaaattgtgaacatgggaagagggggaggaagctacaagagtgcaaagggaagaaaaggaaggatgcagaagtcatgaggaagcagaaattttgagtcaggtgtagattaaaagaaaggacatatgacaggtaggattttagtttgtttctgtgagtttctccaacctggtacagacagaccccttcgctcttcattcctccctctcttcaactaaattccagatttcagctcagtgtatttctgtgnnnnnnnnnntctgcttccatcagccactggatgaggactctagaatggcataaaaagtaatcatcagtctcattataagggaagggcatttaggttatcctctccaccactgcctagattgtcagttcgtgtcatccctgtagatctctggaaatctccctagtgccagatctctcctcagacctacaatgactccctctgatatgttatctctcatcctgctctcctctattctttccccaactcaataattctgctcctccatttcctcctctcctctcctcttctcctgctctcattctggcagctccctctcccctactctcctgctcccaattagctcaggagttcatgccatttcccattcctggggtccatttatcccttagagtccttcatgtttcctgaaaaactaaattcttatacttagtaaataatatataacctaacataccataagttcacagtatgaggagataattattctaaaatcctggttatttttagttaattaataccaaaattttagttaattaataccaaaattttgtcagaaaatataaatacatcaagaatcttaatttcacaatatcaattcattacagatgtaaagagtactcattgtgtaaagttgcagattttccaggcagaaaaaaatgtacaaccttattaggctgcttaacaaacagatgaattcacaattatttaactgcattctacatctgaacatcaaggtcagtgagaggaagttttagaatgggaaagactgggttttctttttgccaatgagcaatgaagactatttgtctccagcactgagaaaggagtaatatcaaaccatagattaagccagctcaaatgctattccaccttttaacaaagacaaagaaaatagttctcttcttcagcctggtcaaaatgctctataactattttgtgtaaatctgaaagagaacccatgatggaatagtaactaacattgacgaagttatacaatggaaactgaagaaaggtgtataaagcatcataatgacctagggtagccaccctaagaaataataacctgaatataacatcagtcttctcaatttttggaagctagattcagtcattctcacatgtaacaggaacttcctgaggggtgctaagccaagccaacctcattatgcctcttctcttttggttccagtttgctgggtgaataactaatgttccaatctgaattctattaagagtttttctaaaaagagttaggctggtggccaacactttcagaaggctgactctgctttatattgaaaatgaagaacctcatgcttcacccaagatctagcaaatatgagggtttaagagtgatactttctgcattctgcattcagcaaatccttcagagtatttatatgttctaacagtgcagaaatattttatttcttttttcctctgtcatgtgcagtacacaccacactctcatgtgtaaacatgtagaggccagagcagaacattgttttttcttcttctagcactgttcacattatcggcttgaggaggtgtcccttactgaatcagatgttcactgtgtgggttaggttggctgagaaatgagctttaatgaccttcctgtctctgtttctgctagtgctgaagtctcaggcacatacagccaagcctggacttttatgtaggttctggagattcaaactcaggttctcatgcttgcacactgagcaatccccaagcctatgaaaacattcttgtaagataaacagaagaggggcagaaaaaatatgacatgtaatattagtccgtatttgatgatgactataaaatagccaatatcaaaggagctcaataaaacagaagaacaataaacaaagtaagtcatatcatagtatatcataattaagttcctaactataggtgatgaggggaaagttataaaagtagccagtaaaaaagcatacaagtgcaaacagagtaaaaactaacagagtgactgaatattgcttttttgtaaacaagatcagtgaaagacaatataatattgataacataataaacagagaaaaagctatagtttagaattctaaaccccataagaactatcctttaaaaataaaggtgaaaagccaggtgttggtggcaaacacctttaatcccagcacttgggaggcagaggcagatggatccctgtgagtttaaatccagactggtctatgcagggagttccaggacacggcagactacacagaaaaactctgtcttaaaaaacaaaaacaacaaaacaaaaataaaggtgaaagcattaatgattttaagcaggtttagaattcatatgtgtatggtgtttactagtgtgatcaatattcggtggaaacttttcaaatagtagatgattttctgacatttagtgaggcaaacatcatatgacttatgagccagttcagagtgcctttcatctagctccaacatctccaggaggcttatgtcactggagctttcacccttctctaaatgttaagagagagacatttgaggtcataatctgtacagacatcatttgtgtgcaagctcctcgaagactataaatagcaaaaaggagtgaatggtagcaattaatagactgagaggttcattggcagatcgatttttaaaaggtgaatttagaaaatcccaatgttcacctagaaattaagatatgatctttgtatagcaattcctgaattctctctgatgggctttgcaatcatcaaagacccagcagttgaatcacttttcatcttcacattttcaacacccccacttaccactaaggatgcagaaagaaacaaccacggcaagtctatacttaaatctgcatttgatgtcagcttgtgctccgtttctttccttcctctgctaccctgggcatctgctgaaagtcttgaggggaatcttattgtttgttagtagttatctttattgttatatgcctgcacattcctgtttattgacggctgtattaccaaacattactttcattttacactccttctaaatgcctttattgtattggagatttcagtagaatttacttagtcactcaaacttagcaagtttttttaaactagaggttagtggatgttaagtactttcttgataaggagactgttttcaggtttacattttgtgtggaattgtacagacccatgtacacattttctttctcaagcatagccagaatagttgactgaactaagaactcaaatgtctcctgtgtagaaaaaaaaaaaaactgggtatatgatgattcatcttactggttcccatatctgtggtaatttttgtctttgaattcagagttagaaatcaaattatcaatatttttggaatgcttgagcatgaaaagtagatagcttgttcaaaccagaattctcaaatttcgagtatttgccttaacatggtttctttctcgaggtgctccaatcttttctaattattgctccaactagtgacttcagaaaagtagactttatccatacctacaattgacaaggagataaagttgttagagacagccacctaatgaaccactgctttctgaaaaataaaaatgtaattaaaaagaagctctttcatggagaaaatgtataaattatgtttatcttgagggcattaatatagtttcccacctgataccatatccaagatcattcatttgtagtaagcaacttaaacattnnnnnnnnnntgtgtgtgtgtgtgtgtgtgtgtgtgtgtgtgtgtgtgtgtgtgtgtgtgtgtttacagtttattcaacactggttacatacttttcactgcattttcaaaaattcaatgtatcagatgcttcttatgtcctcaaaatcccctcaccatctgtcctatctacactaagaccgatactctactcttgctctggtcattttgtcttcacacattgcagcggtctgttctgtagcttgaaggcactgtgctgtgcccttgaacgcttgcttgcccaggcattccctcccactatgctgtctgcattgttcttggctttttctgactgggggattccaggaagcaatgagactatctttcttgtttttaccccagaagggaaaattctgatattctcttcagaaagttcctcagatttctagatctttaagcaagtaatacctagttcaaaacatggtttcttcttaatgttccctcttttctttcatcttctctttttgccaacccctctttcttccagggattacattctcactgtcaaagtagctattggcttacatgtattttgtctgaagtagattctgagactgtagacggcttaacaagcattatggctagacatagtgatccatacatgttattccaaccctgaaacctgaggttgaaatagaaagattatgtattcaaggccagtcccattacatgtgacgaccctacctcaaaagaaaaataaatctgctctcagatacccaactaacttccagttgggcataagcttgtctagatctttgctgttgtagaatttggtgattgtggcatgcatattgaactcctatcaggtatctgtggtcccctagttgcacattctgtctaatgctgctttgagagcatgtctcagtttgctttctgtgtctgtgataaacatcacgaccaaaagcaacttgtggagaagagggtttatttcaccccacagcttataggccttcacgaagtatagttagagcagtgactccagacagtatcctgaatgcaggaactggaatcaagaccatgaaggctacggcttactggattgctctttatggcttgttcaaatttgttttcatataggatccgagaccacctgacccgaggtggctttcccacagtgagccaggccctcccacatgaatcattaatcaagaaaaacctccacagatgtcctacagaccaatccagtagagacattccctcaatggaggttccttcttcccagatggttctctaatttgtttcaagttgacaaaaaacataagtagcacaaactctttataaaacttgaatgcattttctttccaagtagaaatatttgcattatttccaaaaataatgataatatcttccaagaatccactgtgtccataatgaactgacatccatagtctttccttaccaccatcggacgttcaccagtcacttgctaccgtgttcttaaatatgtcttttctgacaggttgcatacaacactgtaagatgatagccagtaactcccactctttaatgatctctgctccttgagtgcaggtaggacctggaaatatggtgtgaaatcagccttctgcttatattgtctgaagaaactaaaagcccctagtcaggtcactacacactaacaaaaaaggatattattctggtgggtctgatttattacagggaccagaaagagggcttagggttttgctaggttgagaaatgctcctagtacatttaacccagcaagctgtcatgaattctgtaactccaaataaattaattgttcaaaacatgggggcttggaaaatagtgtaagatgagattgacactgactctggtcaatacttcaattgaagcagttgagactctggaggcaggatccagttatattgtgcccagactcctgactgacagaaactacaaaatgagagatgtgtgtgttgcttttgcagctttgcgaccctttgttatacagcagtatcaatagcttttgtttgcattagcatttgcctaccaggcaaagttccgaaagggcagtgtctctttttttttattgattacttcaatatctagcacagtgctttcaaaacaacaaacatataataattttttgttaatgaatacctaatagctaacattctgaaaatgaaaaaaatatgaaaaggtctatttgggttttggtagtgtcttccacattaactcacaaatttcaaatagcaacatatcttgggaaatgcaatgaatcacatttggttctcaaagtttttttttcatctggtaatcatgagacctagtaacaccatctattgcaaacaatagtgctagatccaggggaaggggctaactgtttaaacagacatcccaagccatgcttcacttctatagtaatgctcacaaaatcaatgaaacagatcttcactgaaatacaaaatgctagtggggcctgcacaaattggtgtcaggggctcaagaaaaggaaacttgaactgaaataacttaatctttttaaagtgagaaattgaagatcatatacacgttcaccatactgaattttcaaggtattaaagtttaatgtaatctatgcatatagctcaggagtcattgcatgaattaatatctttagcttacttaagggtacttcaattaaatatgtcagaacaacacaaaaatctaaatccctagtaaggtgatagcagagctatctaaaaatgaaaaacataaataagtaagaatttcaccaaatgggaatactcagtgttttaaaagacagcatctgtgtggtttcaggtgggacgacttttaattcttaaagtcatttagcaaaatctattgctgacaattagttgaatttttttatatttgttactcttattcttactggaattcttgcttgtaatggagttaaagattaatcaggttgtccagatagtaaacatgtcgttatttggacaaatatgttaagttcagacttagacaatagtctcttagatgtaacctgccctatattgtttccttgcttaatttcaatacctaaatttagaattgcactttgataagttaatttgtctataacttcagaatgaaggacttaggattagttctcccgatctgtttagaaagcacttcatcacacttctggtaacacttgaaactcatggacaagagtgaaatactgagatcagagataaaagtttccaaaggaaaagaaattaaagctattttgtaagtgagagataaaaaaattattacaggctaagcctttcttgtgttaatttcttaaatgtgaaaagtatccaatgaacccattaaatacattttgacagactaacagcaggaggcttgttgacctctcacctcatattgatttcctcttcagtccttttccttggcgatttctacttttcctgcatatattttgcctcgcagtctattctccacacgccacgtctgtaatcactggcagaggaaacccacaaagccctgagccacacagatatttaggaggatctcgaaaatttattcccatctgtcagtaagttctttagtcagcaaatacttccataaaaaaatttccccagctttctcaataggtgagtcaaaatggtcattaattattatttattcactgctcatcaattccaccagcactgggtgacaaacatgaaaactcaaagaaaggaaaggacgggtaaccctctttattcaggcttttagaaataccatctgtaaggaaaatatctactaatgagaaataagcaaccaagatagaatttaggtactggggggaggggtggtaaactaattgagaaacccatatgaactgccctaaagccaataaagatacaagctggcttgtatacaaggggttggattactcaagttctgaattttgaaagtcgtctttgatgtcatgtctgaggtcagtaaagaatgtcagagatctcagcagtaactattactaagatgagccagagtccttaatgctgcaaccaaagcattagtgaatggccaaggtttgggaggctcagagtatgaacacagagttgtgacagttcttcaatttgaaataacatgcactcgctatctgcaaagaaaactaaaccttcaaaaatgacccttagtcaagattaaatacattgttttgtgagcagccgtatagccccaacttgtagttgtcttcctctgagtccatgtgatggaaaaacaagactcccttcactgttgcctctaaaaaacagcaaagccatcccaaatggtattaaagtgcactgtgtgtttggctgaggattatcagggagagagaagcagctgtatatttgcaataggaagaaactaacacatactgaggcacttatgtccttgtgggagcctcactttggctgccactcaagtcattaccatcttttttcccttgtttctcccttatctctggcctactttatgcagcctacctcacctgtgatttggcttcaagccttatctacttccaaataaagaggtcattaggtaccaggatccacttaacaaaatatctggacagggacactttatgctcattcttccattgacaggaaagttaagtcaagggggttcgatgaagcaatagaaaccctaagacaagttgataaacactattgtcctttatgctcattctcccattgactggaaagctaagtcaagggggttcgatgaagcaatagaaaccctaagacaagttgataccaggatggggttacgtctctgtcagacctcaccatgttttttgggagaattctggaaggactttggaactttggactagaaaaaccatggaatgttggattttggggaggattctggaaggactttggaactttggactagaaaaaccatggaatgttgggcactcagtgcaatgttctgtggaagatgagaatgttgagattagtgaagaggatggaggcctggcttgtgaaacacccttgaatcaatcggtacaggagaccacttcctgaacgttacaccagtagcacagacactgaggtcaaccattgataaactgctcctgaaactgagaagcttctgtaaggcaaaggagacagtcagcaaaacaaaatgccagcccacagactgggaaaagatcttcaccaaccccacatgtgacagagggctgatctccannnnnnnnnnnnnnnnnnnnnnnnnnnnnnnnnnnnnnnnnnnnnnnnnnnnnnnnnnnnnnnnnnnnnnnnnnnnnnnnnnnnnnnnnnnnnnnnnnnnnnnnnnnnnnnnnnnnnnnnnnnnnnnnnnnnnnnnnnnnnnnnnnnnnnnnnnnnnnnnnnnnnnnnnnnnnnnnnnnnnnnnnnnnnnnnnnnnnnnnnnnnnnnnnnnnnnnnnnnnnnnnnnnnnnnnnnnnnnnnnnnnnnnnnnnnnnnnnnnnnnnnnnnnnnnnnnnnnnnnnnnnnnnnnnnnnnnnnnnnnnnnnnnnnnnnnnnnnnnnnnnnnnnnnnnnnnnnnnnnnnnnnnnnnnnnnnnnnnnnnnnnnnnnnnnnnnnnnnnnnnnnnnnnnnnnnnnnnnnnnnnnnnnnnnnnnnnnnnnnnnnnnnnnnnnnnnnnnnnnnnnnnnnnnnnnnnnnnnnnnnnnnnnnnnnnnnnnnnnnnnnnnnnnnnnnnnnnnnnnnnnnnnnnnnnnnnnnnnnnnnnnnnnnnnnnnnnnnnnnnnnnnnnnnnnnnnnnnnnnnnnnnnnnnnnnnnnnnnnnnnnnnnnnnnnnnnnnnnnnnnnnnnnnnnnnnnnnnnnnnnnnnnnnnnnnnnnnnnnnnnnnnnnnnnnnnnnnnnnnnnnnnnnnnnnnnnnnnnnnnnnnnnnnnnnnnnnnnnnnnnnnnnnnnnnnnnnnnnnnnnnnnnnnnnnnnnnnnnnnnnnnnnnnnnnnnnnnnnnnnnnnnnnnnnnnnnnnnnnnnnnnnnnnnnnnnnnnnnnnnnnnnnnnnnnnnnnnnnnnnnnnnnnnnnnnnnnnnnnnnnnnnnnnnnnnnnnnnnnnnnnnnnnnnnnnnnnnnnnnnnnnnnnnnnnnnnnnnnnnnnnnnnnnnnnnnnnnnnnnnnnnnnnnnnnnnnnnnnnnnnnnnnnnnnnnnnnnnnnnnnnnnnnnnnnnnnnnnnnnnnnnnnnnnnnnnnnnnnnnnnnnnnnnnnnnnnnnnnnnnnnnnnaccccgccccctgctagcctctggagaccacaagtcctgacctcgcagggcgtccttacctcgcaggactgtgcactggtatttttaagctattagttttgcggacatttaagatacagcaatagaaaactaagacagaaaaaaaaaaaaaacatccacacggcagtcagtgacaaaacacgtgaaaaaaaacaaaaaggaagaagaagaagaagaagaagaagaagaagaagaagaagaannnnnnnnnnnnnnnnnnnnnnnnnnnnnnnnnnnnnnnnnnnnnnnnnnnnnnnnnnnnnnnnnnnnnnnnnnnnnnnnnnnnnnnnnnnnnnnnnnnnnnnnnnnnnnnnnnnnnnnnnnaattgtgtcactgggcttggtaatgtgtaagggtcacttaggtagtacttgctttgaaggcatgaaggggtcgtggaaagcagctgaggcttggcactatgagaggccagcaaaggccattggtgaaggtgctgcctcaggggcagtgaaagtctcaggatgaaaagtgtcatgcacagaaactgaggcttggcaccagaaagagagcccatgaggggctcttggtaaaagtgcagcccagttgcagcgagggaccccagcagtttcagaaacgccagtgccatagtgtcttagttagggtttctattgctctgaaaagacaccatgaccacagcaaatcttataaaggaaaaacatttaattgagtttgtttacctttttagaggtttagtgcattatcctcatggtgcaacatggtagcatacaggcagacatgatggtggaggaagagcctaatctacatctcgcaggcaacaggaagtggtctgagacactgagaggcaccttgagcacatatgagtcctcagagcccgcctccatactgacacacttcctccagcaggaccatacctactccaatgacagcaatacctcccattagtgccacctcctttgggggctattttctttcaaaccatcacattctactccctagcccccaaagggcttgtagccatatcataatggaaaactgcattcagtccaaattcaaaagcccccatagtctgtaataatctcaaacttaaaagtataaagtccaaaatctcttctgaaattcatgcaatctcttaggattagattttaatcccctataaacatcaaaataataataataatattttttaaaagatcacatactcccaatacacaatggcaagggatatacattactgttccaaaacataggaaagggagcatagtgaagaaacatcagaacaaagcaagagcaaaatccaggtgggcaaactccaaactctgcatctccatgtctgatgtcaaaacacttttcagatctccaactcctttcatcttctttgacttggactggtcccactgttagcagtactcctcatcaggtattccttgattctgacatctcgaacatcttggggtctccaaggcaatccaggcttcaacttcacagcttcacacaatggcctctctaggcctctattcagggacacccctgacagatgcctggcttcagtggcttttcttagtcccagaagcaaattccatagcccctctcttctgtccttaactccagagccatgtggacaaagatgccaagttctgctacttacgagggctgtaacatggccttcttgttcaattatgccttcaccatcttctattttccttcagtgcctatgcttggctgtcctttaacttgctctgtagaccagctgacctcagactcagacatcttgctatcgtctgcctgcccagtgttgagattaaagatattcagcactatacccagctcataccttttctttaatttcttttcacaagttggaaacttatctgggtgggatcttgtcctgaggttaccactccctttattccatttcttaatctgtttatctccttgaacacgggatttagctccattctatttctggtgttccttttctcctcaaacagttttccttgctcagctggctccctttctttatatatattctctagagttgatgccagtaaccgcacaacagagttatgtggttatatactcttccaacagaattaatacaaaagtcttcactttagctccagctaactttttggatcaaggcaaaaagcaacaactttttacatcaaaatatccaaagaccaatttctaagcaacatactaaaattcttctcctctaaaacttattgagctagcccccccacacacacacacacgcacacacacaaatacttctcgaatcactcttagaaccacagtcttccattctgctactgaaatggccattaagcagtgcttacagcattcaagtgctttcataaccccaaatcccaaagtccaaattcctccaaacaaaaacatggtcaggcctgtcataataatacctcagtattaataataccctgatcaacttttttttttcgagacagggtttctctgtgtagctttggagcctatgctggcactcgctctggagaccaggctggcctcgaactcacagagatccgcctgcctctgcctccagagtgctgggattaaaggtgtgtgccaccaatgtccagcgaccaacttctttcttagggtttatattgctgtgaagacaccatgaccacagcaacccttataaagaaaacatttaattacagtggctctcttacatttcagagattcaatccattatcatcatggtgcatcatggtggtgtgcagggagtcaaggtgttggagaagtagccaagagtcctacatttgcagacaacaggaagtgaactgagacacggagtagtatcttgagcatatatgagacatcaatgcccacatccacagtgacacacttctttcaacaagaccacacctgctccaccaaggccacaccttctaacaatggcatttggagcctttttttttcaaatcaccacacatgagatgggcaccaagatcagcagttgccgtggagtggagacacccagagcctagaatacaagctgtgtgtgctgtggagggcagagccagagaaatgacccaagccctttggtgggctccagaaaatgataagggatcccagacaccggacagttggaatatggttttgctttgatttgtgtgtggcagtgccctgatttttccctcttgaagtaaaaagtatttaactggagcctacaattgagagactttgaattttaaaagagaatggctaatttaaaggaacttaaatatttatgtgtttgaatttgtaaatactgtgggacttttaaagttatttatattttaatgtgagatcttggtgatgaataagaaaagaaaggttatggcttaatattgatgtgtttgtgtgtcaagttgacaaggagccagtttttttctctccattttttatttaaattagaaacaagattattttacatgtcaatcccagttccctcttcctnnnnnnnnnnnnnnnnnnnnnnnnnnnnnnnnnnnnnnnnnnnnnnnnnnnnnnnnnnnnnnnnnnnnnnnnnnnnnnnnnnnnnnnnnnnnnnnnnnnnnnnnnnnnnnnnnnnnnnnnnnnnnnnnnnnnnnnnnnnnnnnnnnnnnnnnnnnnnnnnnnnnnnnnnnnnnnnnnnnnnnnnnnnnnnnnnnnnnnnnnnnnnnnnnnnnnnnnnnnnnnnagatttccgaggtctcctcactgacacccaccaccttcgtggagtctgaatcaatcccatgctggtttcccagctatcagtctggggagcaagagttcccccttgttcaggtcagctgtttctgtggttttcaccagcttggtctggacccctttgctcatcactcctccttctctgcaactggattccagttcagtttagtgtttagctgtgggtgtctgcttctacttccaccacctgctggatgaaggctataggatggcatataaatcagtcattaatctcatcatcaggggagggaatttaaggtagcctctctgttgtttacattgttagttcgtgtcatcattatagatctacagacatttccctagcacctgatttctctttaaacctataatggctccctgtattatggtatgtcttatcttgctctcctctattcttccccagctcaaccttcctgttctctcatgtccttctcacctctcctcttccccccttctcattctcctagttccctctccccttccttcatgctctcaatttgctcaggagatcttgtccctttccccttctgggggtggggcaatgtatgcctctcttagagtattccttgtttcctagcttctctggcagtgttgactgtaggctggtaatcctttactctatgtctaaaatccacatatgagtgagtacgtgccctgtttgtctttttgtgactgggttacctggctcagaatggtttcttctagttccatccatttgaacaagggggtagttttactggctggttttgtatgtcaacttgacacaagctagaggcattggagaggaaggagcctcagttgaggaaatgtctccatgagttccagctttgaggcattttctcaatcagtgaccaatgtgggagggttcagccttgctgccatccctgggctggtggtctctgtttctagaagaaggcaggcagagccagtcatggtgaagcaggccagtaagcaacagcaccgctacaggaactctgcatcagctcctgactccagcttcttgccctgtctgaattcctgtcctgacttccttcagtgatgaacaacaatggggaagtataagtcaaaaaagtttttcctccctaactttttttttggccgtggaggttcatcacagcaaaagaaaccctaactaagacaccctttgcaatttttatcagttccctttttcatttcttcaacaaatatcaagagctttttctctccataaccccctactatgagataaaagtttggcctccttttaaattgatttgtttaaatcttgaccgatagcagggttcaaatgtgatatatataccctgtaaggtagtaatggagattaaactggatcacaagatgaatccctaatccagtagagatggtatcatccaaataatggaaatttctctcctgatgccatgtgaggacatgaagcaactagaaaccaactagctagtaccttgatcatgtgcttatagcctttagacgaggacatgaagcaaagatagcccttactagaaaccaactagctagtaccttgatcatgtgcttatagcctttagaactctgaaaaggtaaatttcagttgtttatgtcacttggtctactgtattgcactgtgacagattaagctggttaataaaaccctgtattgtacaatttcccatgcagcttagtagatgattgtgcctttggcttcattaagaaaacagaggtcctcccatttttactcatgcattctgttactctaactccaagtgtccacacttctacctagacttgctgctttcccatctcagtggtgggtgggttagcagtgcactttgtggaaaccattcggcttgtattgagacactttctatatcatctcacacttgaaggtgctctcttgcctaaagctgttggtgcaacacaatgaagtttaaataaatctcaaactccttacagtggatatgtggtgtgatgccctaatctcctgattttctgaatctttggaagataaagttgatatcagtaatatgcttactgggagtctagtatttctaaaacaccattatctctttgtctgggcacatctgtaaagaatggcagagagccaattcaacatttcacatctgagtatgagtctatcttttttacatatggtgatctttatgatgttccctttatgctggtgtccaggcaagaagttctctttttcatttctcctaattcttcctatgttatgcagttgttgttttttttttcttttttgctgtgatgaaagactttatataaacagtgtgcagatacaagaaattgtggtggaagaggctgttcatcccatggcagacaggaaacaagatagagaaggggttcggagacaaaatgtggtggtctgaaagaaaatggtccccaaagggtgtagcactaatgggaggtatgacctctgttggaatagttgtggtcttattgaagaaattgtgtgtcactgtggaggtgggctttgaggtctcatatatgctcaagatagaacccagagtctcagttcacttcgtgttgtctgcaagagttagaacccttgcctacttctccgacaccatgtctccctgcatgccaccatgttgccccatgatgaatgataatggactatagtgtaagagagtcaccccaattaaatgttttcctttgtatgagttgctgtagtcacagtgtctcttcacatcaatagaaaccctaactaagacacaagacatacccttcaaaggcatatacaatctaataaaatagagtggcctacttcctccaaccaggattcaattcccaatagcccaatcagctctgaattcatccaataatgaggattacatcctgtgacccgattacctctcatcagtagcaccaactctgcaccaaaccttcattggtgggtgtgttgtaggaacaaggctggtctcctaagtctccctggaagggtcatctctctttagtttctatcacagtctaaaaccaacacctgtaatttttcccttctggatttttgccatggctctttactaaattatcagcctcatgtatcaatccattttttttttttgtatttttgccaaagtgaccttcccaaaatgaaattttaatcatgctactcttccatttgggaacattccaagctttccactgtgtgtaagaacttacagatatcagacttgatccttacctgcacttgggctgtttgcgtctaatgttctcaattctggcccttgttttagctattctctgtgacttttatctctttactgccagtccaaccattttaggggtctctctctctctctctctctctctctctctctctctctctctgctacctttctcagggtaagcagtgacccttctagaggccttccctgacataatgatctcacctcccctagagcctaactaaagaaatgtctacttcacttgcaactaatgaaaaaagaccaaggcaaatattattataggagaaagaacaaaaactctagagaattggcattctttgaaattacagaaaaatgaaataatagagtaatatgtgggtaaaagggggacatctaactgggtgatttttacttaaaatactggtcatttggaaaaatccagcaataataaaaagtttgagctcatgaccacttagtatttaaaacatctgaatgaaattatgttagacatatatataaaaacttatgagtggcaagtggcccatatgcttggccatacagattttgcctggggcaaaaatccttaccaaaataaagtctatgcaacagaaaaaaaacactcattttgatactaatttgataaattcaacggtgtgatagaatcatatttttagacattctttaagatgtctcaagaactcaagcaaattgttaatggcatctataaaacccgagacctacattttgattggtatgattatttatgtttgtatacatacatagttaataaacctaccatatactcacgtatttacaagtgaacagaaaacacattacatgtcaccattttcttatgttcttagaaaatgttgtggccactggcccaaggcttttcaaattgtgggtctccatccactgatggatcaaaacgttaagatggctcctatcataactttaaaaatgaataaaagtagaagtgagaaaaacataacagaaatcacaataagagagttactatttctgcaaacatggttgaaagtccggtgaatgaggactgaggcttagggatgaagtttgaacccctgaactttgaggaatcctgattcagtgctgctgctagctgctcagaaatgtcagaccccattagagccatgagcaaagacatcctcactgccattatgtcatctccccacttgttctgtgttactgagaaaagacaaatttagattctcctagtaggctaatataccatgtgctgtttagtgatgtgaatctgctggctcatttgtcactggacacaagctatagtcaccggagagggaagcatgtcacttgaggaattgctttcataagacctggctgcaggtaagcttatatgacattttcttgattgataattgattggggagggcccagcccattgtggatggggccaccacttggcttgtggtcctgggtgctataagaaagcagactgggcaagccacaaaaggcttgccaggaagcagcactggtctatgacctctgtacccactcctgtcttcaggttcctgccctgctgaagttcttgcctaacttccttcagtgatggactctgatgtgcaagtaaaagtcaaatgaatcctttcctacccaacttgcttttggtcatggtgtttcaatacagcaatagaaaccctaactaagttatctgtttttctcttctagttgctagcaggtatgaagtaagttcagcacattttgaattttcatagcctcatggattccctataatccccttgattgtccttatctggctacttcatcctcttctcccaaaacatattactttaagtcatgtttaatgctatttaagggtcttcagttagctcttaatcctgtaaatttattatatgtacctcagaaccttcctgaaaatgtttctaagttacttatgagatgaggctatcaattctttctttaattaatgagctacatgacaaaagtataaaaataactatatacataaaaattagacttccccttcttactgatgtaaaactcaatgtccatagaaatgattatctgtcctttaatctacatagttttcacttgttatgattacattgaaaatggcaaaaagttggaaattttaactttcttttcaggggtaacacactgtattaaatctataaggtcatatctacgtgggtttgattacaaaaactaataaagtattctctaaataaaaaataaaaaaaataacagttccaaaaaataaaagaataagtaaaaaggaagggtctaggaggaggagacacctgggtctctctggaaaatagaataaattttatgagagggtgggaatggaaggatcagatagggggaggaggggaggtaaggtagagggagagaatatggagtgtagtgatatttagtttatgatctaacaaataatgcttgcctgaagatcagagtgcaaatctatcgacattagttcacaatggaggccaggaagttgtagtccactcctttaaacccagcactcaggagatagagccggacagatctctgttcattcaaggctacccaaagctacacaaaattgatccaatctaagggagaaacagagctcacacaaaggtaatctcagtgcttgggatcccacacctttaatctagtactagagaggaatataaggcgggggtggcagggtggggaagctgggagctcagtgcagtctgaggtttggtggagacagatgcagtctgacaggatcaccctttaggtctgagcattggtagcgatgagaactctctagtgaatggccactttgcttctctgatcttcatctttaaccccaatatctgtctctgggtttttattactaagactaactagaattcctgctaccgtgaagagagacatctggaattgggggatatttgagggacgatatgggaacagtgtaatgagaactccctaaaatagaaggtgatcctcatgaggtgtaataatgggggatatggtgtctcaacaggccatctcttgtcacaaaaccaagggtccagtagtgggactgggttgcacgcaattgcattgttggccaaggaggtcccatggaaatccccaaacaatccagaccattgctaaggcaaagggttgccctccacagattgacagcaaggccccactggtgaggacaattactgtcacaactcacagaccatggagaagtcgagctggtacctacacggagccttcaccctacattctagtctctttggtgtgggaaggtactcagaaggctaccaaaagaaaaacaaaaatgaaagaaagaaaaaagaagaagaaaagtaaaaaaagttagaaattttaactttcttttctagcataaagaatagttaaaggcgacactgaattttattttgctgtagtagagtacttctctcatttcatctatctcaagaggcagttaaataaaagatgcatctattgctttaatttattaaaataactcctcaagtgtgaactgaagattgctttgtgatttttaaggatgttacatcttacatgtatctttggggagctttctaactgtaaaagtgactttttcacatttttcgtgtgtgtgtatgtgtgtgtgtgtggtatgatgtgtatggtgtgtgtgtatgtgtgttgtatgtgtgtgttatgagtgtatgtatgcatgttttatacatattgagtatacatgcatttatatgtgctaggagaagtcttctgtacatgtttctcttattggttgatgaataaaacactgttgaccaatagggaagcaagataggtgggactaggagtggaggagaattctgggaaatgtaggaaacagaagttgccaggtgatccaggtagtaacagtatataagcagggacaagcaagaaattgctctcttctcttctctgtggagacactgagcagatgcgatgtagacctcaacagagtaagaggcctggacctttcctctagtaagagaaggccatgaagaaatagggccagaaaaactcatgctacatgtatgtgcagatgtatgtgaaggcctgttgtcatgtagggaatcatctgctaccatttttctgccttatgcattgaggcatctgaagcaaacccagagttttgccgtgtgaaaatccttcctagctaccttgctcttacaatgcaggtagacagccacacccattgaatgattttgaatcagttaatgtgaaactgttagctctggatcatatttacaaaatgtttccatcgtccttcttgccctcaggtgctaccaaggtgatcactgggcttgaattgattactaggccccaatacattgcatcttaatggagataatgcaagtggatacttcctcgtttacattaatcgaaccagaaggcagtagaaactgaaatatcagtgaactatcaaaccactactacagttgatatcttggcccattttttagctaaggctgctaattatgcagaataatgtccacctacttttctgtttcccaataatgttaatgataagaagctgaaatgagaccaccattacatgacctttctggaaaagaggctaatctccatggaaatgtttagattccaattggctcaattcattggttcattcagaataggattattattgggagcttctaggaatttgggttcaagtgtccaaggaaagagaagttgttttgctgtcccaaagcaccagggccgtctaccgcacaagaaatggggttgatgagtgtgctacaattaatccatgtctattgttgaaattattctcagtggacatgtgacatttccttcactttgtctaggagcatatagagaaataccaagttccacacaagccaaggggtggggaccactgattgctttgtgacactggggaagttactgagaccacggtgacataggattaggaggctgctcatttcttcaaattgcaccatcagacatagcaaataaaaatccaagagacaactaaattattccaaaaatccactggttgatattttagtgcttactaaatactgtatcaaatactgtatattgctacaattacttgctgttcgtatgaaattttaactgtgtgtcctgtattttatgtggcagcagtatttcaaggggtgagtagtatttctcatgccattagtattttcagtggcattagaaatcctagttagaaatactgataccatcttaggcttatttctattgataaaagattttttagaaaatatttcagattgtgagaatctttattttcagtaaaataagacatggtgatatattatttataatttattaaagcttgtctgaggattcagaaagcaaagacagcatcaagctacagagatcagcagtggtaatacacacctttaatcccagcagccagaagtcaggaggtggtggtacacacctttaatcctaaaactccaggattaagagatagacggatatctgtgactccaaggccacccagatctacacaagattgatccagtcctaaagagaaacagctcacacaaaggtgatctcagcacctggaatcacatgtctttaattccagcactagatgggtacaaaagatagaagcagggtcttcagtagtcagtaccaggcattcattctccagctacattgaggataggaagacatttaagtatcagtattctccagccacgctgagaagaggcagcaggtggaggtttggtgaagccaggatcacatctgggtcttttatttatcgtgctacaataagagcagacagatggagacacagatagtcctcatcttcccttgcaatgggcagaatggttagacaggaaaatgaggtaccactctgatttccttttgtaattctttgtgaatcaaaagtatatctagtccgtggtgaaacagtgcagcaaaattgcactgtacagatgctgcattccaaggagcagtgatgcttttcatctagagatactttgtgagagacactgtaacagtgactcatgccccatcttcttctatagaattgcatgcaagcctcaaagtgttgagcatttaaacatatgtgtacattggtcctggcttgtaatattttcatgctttcaaattgcttgatcattttgtattacaagtagtcatggagactacagggacattagttctgaaagtaacttcatggtgttgtatgcctcctcatgataacacttgtcagctacctggccctgtgagtgagagtgtcacccactgattagagaagaaactcagctcagacttagcatattgattgagactgttggatgaaaaggtggcttttgtaagaaaacccctcagatcttcagcccccagtgcacaggtctttctattaggtcaaattatggtctgtgtaatgagtttaaattttataccttggatagttttgagaatgtgccactgaaaaggatactggcatctttcctgagtgcatgaagactggtacctcactagttgttgtgccttatcctgacttgatctcatcagagatttcactaaaatgtagatgttccagtgtctctgcatatcaggattgaacctgcactgtcagcctcacacttggctctttcatacctcttccttccttggttcttcagcatgctgcacctacaacattatctccatagactttctgagatgcaatgacaggaaattaatgaaaacaaggatggtaagggatacttctgtgttttcaatcttcctggtactttaacctctcttcctttacattgtctctttacatccagacatactccctgcccctgattctgattcagtcctcttaggcaaatgtcctaggtagcttgagccacagtaagtttgtgaaatatgcagcaatattatttcaagtctccacattccccagagacccttcactaacttctagccggtgtgtccaaacttttgacactgtgatacttgttgcctacagagcccaggctcaagaactgcacagcagaatttttttaatctcatatgttgagtatgtttcttgtgtgttgtactgcattcctaggtatctgcagtcacatgcagcctataaaacacaggttggacataactacaacttggtctcaataaagttttaacaccaaaactaaatgtaatagtatatcatatatttacatatatttacttatctatttttgaaagtggcaatagaacacatatgactttaaaatgatacaaagaattaataaaaggtgagaaataaagatatccctggctgtactttggaacctaactcatgtgtccactatcaatcttgacagtgtatcccactctgatctgcactattacttcatttgaataatggtatcttgttactttgagaaaaaaaaacattaccaagctataataatgaaggagaaggcaaccaatggaacagtagacagctcagaaatgagctcataccttgcaatccattgagttttgaaaaatttgccaagaattatgatgaaggaaggaaaatctcttcagctactgatattgagaaaactgaatattcaaatgtagataaaagaatgacattggatgcttgtctgatggcctatacaagtcaactgaaaattgtttaaaaacttaagcaaatgttctatggcagtgggctgagcaaacagcttttctagatatgacctcaaatgtacagacaacaaaatggaagtttattaaaataaaaagcttccacatatccaaagataaaatcaacagagatactacagaaatggatataattttcaaactatgtatctgataaggactgatatccaaaatatataagggattcaaacaactcaataagaataaaataaacactccaattgaaaatggatgaacagcctaaacctgtacttctcaaaggaaggcatcatcatggcaaatgggcaatgaaaagaatgctcaaagccacacatcatcagagaaacccaagttaaaaaaaatcataaagccatcacttcatatgcactcaaatggcaactatcaagaaagcaaaagatgagtcttgatgagctggagaggtgctctgtactctgcatgctattgatggtattgtaacttgatatacccaatacaaaaaaaaaaaacactatagaagtttctcaaattattacagtgagaactgtccattgatctaggaaccccactactatataaacattcacaggaaatgaaaccaatatattgaagacatagatgtgctctaatatttactatataattaaacatcataatcaagacatgaaatcaaagttcccattaaaagacagagtaattgtgtttatacacaacttaatgatatttggctgtaaaaataatggaaatccttccattaaaaaaatgaattctgagcttatgttaagtgaaaaaagcccagaacaggtaacacatgatctcatttacatgtgatacataagaagttgatctcatagaaacagagcatagaatgatggttaccaagggctaaaataatggggaaaagagaatatggtgacagaattaaaaaataggggcctagagagatggcataaaggttaagagcactggctgctcttccagaggaccaggctgaatgtctgacacccacaaggtgacggctcacagccatctgtaactccagtccagtggcgaatcacttataaatggcgcccaagcaggacccaaagccaaaattccaggagggtgagagagtgctgtgctttcatgggcctcttctctatgaagcaaagtgtgtaaaggttgccataaagaacaaacaagtgaaatactttatccattacagtggttggaataaaaatagtactgtgaggcctaggcgctctgaaaaatatttgaaggcacgtgaggatattgtagcccttttgcctgttcctgaaggagctccctcagtacaccaccccctcttgacctctagttgggatgaatgggttccagaaagccgagtacttaaatatgttgacatcaatttgcagaaacagtgagagcttcaaaagcccaatcaggaacagtatgcagagggcaagatgagaggggctgcttcaggaaagaagacatctggtctgcaacagaaaaacgttgaagtgaaaacaaaaaagaccaagcagaaaacaccctgaaaaggagatagtggcagtaccagtgagacacctcagcctcctaggaagaaaagagcccgggtagatccactgttgaaaatgaagaaacattcgtgaacagagttgaagttaaagtaaagatcccggaagagctgaaaccatggcttgtggatgactgggatcaccagacaaaaacagcttttttatcttcctgccaagaagaatgtggattccattttggaggattatgcaaactataagaagtctcgaggaaacacagataataaggatatgctgttaacagttcttcaatgtaatgctgggcactcagctactctataaatctgagagaccaaagtgtgctgagattcttgcagatcaccctgatgtgccatgtctcaggtgtatggagcgccacattgactgagattatttgtgcaaattggagcaatgttggcacctctagatgagaaaagccttgctttattactgaactatctacatgatttcctcaagtacctggtgaagaatttggcaactttgttcagtgccagtgattatgaagtggctcctcctgagtaacattggaaagccgtgttacattatatataatacacattgtattatattaaattgtatgttatattatatatagtacacattatattatgttacattatacataatatatatattatatatatatattatatgtacaaatgtatttatacatatgtgtgtataacagttgatgtttaatatatgtatatatacacatataaatatgcatatacatcaacaatttaaaaaagagaccatgaatttgagagagaacaagggcatgcaagggagtttgagtaaagaaaagaaacttggaaagtgatgtgtttatattataacttttaaaatactattttaaaaaaccaacacatttttcagaagatctgtgctccaatagtcacccttcccttatttaaggccatcttgtacttataataaaatgattctcagggaagattttattattcccgtattatatgggaagcactccagaagacaaatgcctgttccttatctataaaggctttcacatggcagatccatagctcctggctctccatattgaatgctgctcactgtggggacactaatttcctttactctctaacacaatgtgaaaccacttaggagaaacagttgatgtttaattctaaagaaagttctagaacactctgattgtgttttctgcttttattcagctcgaaacatccatcttgctctccttttgctttggggttttgctagctagcccatcttttcctctgtttatagagtggtatacatataccttaaaccacttcctattcataggccacaaatataacctgtgatctcttacgacaaaatagagctattttccaaccatagcagtggatagtttataatatcttttcatcttaaaggacaaagaagatagagtgaaatgtccagttatctgccttgcaatgtctgaagtctgtatccttaaatgcctgcttgttggggaggcaaggcagccttcccgaaatactggcaggcatggttttcccttgtgggtttaattctggaagcacaaaagatgctctaacctttctggccatctatgtggtaccgcagagaggtccaccagcctacactgatcactgagaagaaataaaaatgaccatgactgtgagagctgagggcagaggggcaatccatgcttcccatcgcagcagagctctgtgattctttaaatgtaaactgagggtttggctggatagccagccgcctctgcagcctcagaaacatggtattagtgaaatgtcagcttgcgttaagatcaccagtggcctttgctgctcacatgcttccatgtttctgcacaaagataggggagcgcggccatgcctctgccccagagatcgatcggccttcgtgtctgatattaccttacatcgctggggccaggtgggtgtgagagggaggaagggcggggagcaaggggagcatgtttactcactgaaccttgagtgcagctttagcaagtggccaggcggcggttgaatcactgaactcactgctgctggaagccctctgttagggtctgaggtgataagaacagatctctgaggagttgaatgtctgcatgagctaaactcagggcagtcaggctgaagacgatgtgtgctctaacctgtttgcactgaatactctccataaataatttacagcccggactgctcgctattattgcaaagataccggattgcattttgacacatgcatccagcttgtaagtcgatagctacagtttcacccagtgtgtgcagacttggcttaagtcacccatccaagtgtgttttccaataatgtaatttaacactctcaaaccagagtgggaagagagctctaagaagccattgccttccatgagacaatagattgtccttccagtctgtattctatttttcctaataaatgagtttatggttttctcctacttggcattaacatctttatgaatacaaagccattttcacataatggtaaaacaaaattatttggatgtgaaaaatactcttttgttctcctgattcaaggaatgtcttccatggcaacacctggtgttttctctgagacagccttgatccagagagcattttactatggtcagttttagcctcctcccccctttacatccaaaatagttatagatgtccgcaggcactctgtcttcccatgggtgatgctagtttccccatgaagactaaacctgtgagtttttacgttttcacgaatgtgaaaaacagcctgcactgtctgtactctaagaaaacttagggtaaaccatcctaataagtaagcaagagatgagcctcattaatgctactcaggatcactgataaagttacttaactccttccaggttattttttcttaaatgaaagtgtgaaatgctgactctgatgctgcactgtctctaggatcaatcaaccacagagttgcagtgtctcccttgtttttttcagaaggcacatttacatgcaaccagggattgcatgcatttttaataagaaactccactctatgtacacgtggcaggaagaaaatagatgtttgtgttgggtgtaccaatagtaatacatgcatctaaaattatctgctagagatttaaaaggagaatcctgggtggaggacaaaagaggtgataaacgatggttgcaggtgaggtgatactaaaatattgacatgtcaaagtagaatgtgtttgaaagtaagcagttaatagcatacactattttctcagtaaaatatctattctacaagggggttcttacaacacgaagaaagcatccttggggatgggaagagttttccatcgcagtgttttctagatctactcacatggatactaacagtacttgtgatggctaatcttggttgctaactgcttgtgaaacaaaccagagccaagctgctgagtgtccttgtgagggattttctgagcagactacatttgaagcagtaagacccaccctgaatctggaccgcaacttcttgtggcagcccacatagatgaatgtggaagaaggaagcttcgctgtgtgcctgcttcccctcacacttgctggcatgttcatctattttgttgttgctgaggtattatttaaccactattagaacttcttttggtttccaaaattgacaagaagaccactggtagcccgtaagtcctttaggccttcggttccagacttggactgttaagactgctggccttttgctctgaagaattcctctgttctcagcctctccagtacgagttagccactgttgggctatccagactgcattctgtatgccaatttatgatttcccctttaacatatatctcttctatcagctctgttcctttagagaaccctgaataaaaacagtcctttcatgaaacacatgtatttcttgacagaggcttaataaacagcccatagggctgtgtattctgcaaacatatttgtagttggcctaaaagaagtaattttgatcttcctgctcccttatgtcctcctctcccctcctcttctccccttctctttctcttaattccctctcccctcccacaatgttcccaatttgctcaggagatcttgtccttttcccctattgagtcgggcgtaaaattcaggagagcaagaaaagaggtaccataacaaaggaagccattacaggtctaaagagaaatctggcactaagaaaatgtccagagatctacaagtttgacccaaactaagaatctaagcaatatttcatattaatattaaatgcccttcccctataatgagattgatgactaccttacatgtcatcctagagccagtagacacccacagctaaacactgaactgacctcctggaatccagttacaggaagggaggagtgataaacaaaggggtcaagaccagactgtagaaacccacagaaacagctgacctgaacaagggagagctcatggaccccagacagatagctgggaatctagcataggactgatccagaccccctgattgtgggtgtcaattaagaggcctgggctgtctatgtgtctctggcaatggagcagtatttatccttggtgtataaatggactttgggatcccattccacatagagggatactctctcagcctagatacattgaagagggcctaggccagctccaaatgatgtgaccgactttgaagatccccatgagaggcctcaccctccctagggagcagaaaggggatgagatgggggatgggtcggtgggggggctaggggaggaggagaggaagtgggaactgggattgacatgtaaaacaagattgtttctaattcaaattaaaaaaattatattaaaaacaaagtaattttgaaatatacaagttactttttatgaataataataatgataataataagaaagaatcttgctaagtaattcaggctggcatcaagctcaccgtcctcctactccagccctctggatgctagggttgcagtcatggaagtcctcacctggccactaatgggttaatcaataggtctgagcaactaaactacttatcagctctttcaaaggtgacaaaaacaaatcagtatcgacaaatgccatctagtagcattaagttatttataagagaaaattatgtgctaagggttgttcagtctaatgtgctgattaagaaaaatcgtggaaaaaaaaagaaaagaaaagaaaaatcatggcatgcagttaaggcaagagaccaccttggaattgtttttaataaggtagtgttgcttccatgcatatttatgtctttgctctttattcccattctcatggggtctatctcaagctgttttctggatgcttgccttcactcccgttgccactctgtgtgttagtcttctggggaggcactcctctccagccagcctaccggtgggctttccttggttgtttccagcacaaggactcatggctgcccttagccctacctcaacttctgttaaaatgataggttctctcaacaagatcatctttattattagaattgatttagtacaaggtggctttagggtaaatcagttttcatatagggtctcaaaacttctcagagctcatgcctaacccagcatgcagcagtcaaagcatttgtatcccatcagcatctatctgtcctctgctaaactctccctcgtttcaggcaagaacagctgttagctgtgatgagtaagatgtctgtctgttgtgagcaggtaaaacacgtggtaattaaaataaggagttaaacttggtacatttgagaatacaagtctccacagaatagtaattctaaaaggaaaagaaaaaacataatcatttgctttgtccatttgttggaaagggaatttcagagttaacagcagactatggattttcaatcagaatagcattatgtagaatgaaaaatgttgctggctgcacttataatgtaataccattgcttttcttcacagcatttcaactatccccatcctaatgagtctcagtaaacacagaggctctcaaatagataaagacttcaatgtataaaaatatgctgactatgagattcattgcacaaatacagatgtagtaaatcctattttaaaagttaccttgagaagaatgtgagccaccgttcactggtcaatgtataaaaatatgctgactatgagattcattgcacaaatacagacgtagtaaatcctattttaaaagttaccttgagaagaatgtgagccaccgtcccctccctttgctttttttttctttcttttttttctttcttttttttttttttttttttttttttttttggttagcccttccttttcttcataatcaaaaccacaagaaggacagaagaatgatcctaccacaggtcttggtgctgcctccagaagtcttccctaagcaacccctctacgttgaaggatgcagagggcatctgggatgctctgtatgattccagtgttaacatggatcactttgctaggtcttctacatgttaccctcaaagacacagcatacccaggctagagatggagagaaggaataaatcaatatatttcaaaggtgaaggttttgcattcccagacagagtgcaagagctttgagtgcctgtacttgaacagtaaatgctgaactgatgtttgctgagtaactatctccaaagagagaaagcaaatgctgcggcccctgtgggttctaaagagccacagtggttacttagaagaaggcattcatgcttttcatatgttcaagttaatccgttttcattcacaattgtgagattttgtcttccctttttaaaaaatggaatttaaatgaaacagttagaaacgtgaatccctgttctcaaaagtccttaactcagctgcatgttgcattcatatgttggtttgtaattcacctaacaagtgctgtgtgcaagacagcagcaagtgtgtgctctagagaatgaacccgattccaatgcacgtttactaagtcatcactatacctttttgttccatattggaggacatgaagaaaataggattttcctatctgcgagtatcggtcctctgttgcccccgagttgtatctctaattaaactgatctctttcctttcgcgaataaaggccctgtggtctttatattaatccccagtacacatacaaagaaactacttgtgacaaaatcaccaagcatatgatgcgctggacgccactgtctcagttcctgagtatttatattccattttccatcctctttccattttcatttttcttttcatctgtagttttactttccaatctcagtaggtgagttggtggtagctttctaaagtaaatagaaagtattctacattccctgattctccgtggatggcacaaaaggactgttattgctacattcaggctgcacttaattgctgccaaattctgaaccacaaacacgggcttgatcacccaaagacgtgggtgatggatagctactccagccatctattcagccatccatctctgtagaaaaaatggtgatcgctggagacaggggagctgacatcagcagagatgaccacaggagtcagatataaaggcagctgaggaagggaattggtctgcaatctgttctccgaggcttgatgtgaaagaggggaattttagtcacttttgttcagacactttgcagatcgttcagtgcaaagaaaatggcatatctctagagggtagggatccacaaaaatttagtagagcttgtaggtcaaagctattgatcatataactttgctaaaattctgaaagatggaaaacacacgccaaggcaaactgtacacacatcaatccatcagctgcttgagtctattttatggattggaacattgttattgaaaaaagcttctactatgtccacaacaaagccaatgaacgtgtcatggttattacccttaatatcaatcctgataatgtcttgctatctaaatatagaagaaacttctgggatttgagttagcatacatcaaaaattgaattgtatgatgagtgagcttgatggttttaagcaaacagaatcttataatgctacttgtatgagtaagtagtaaaaatatcaatccttcacattttttgttgtgggaggtttaataatatccccccaaatatatgttcacataaaacttaagattgtatgtgaattcaaaataagtatctttatagatatacctcgcctaagtaactcaagtggagactatactgggttagaataacccctacatccattgacaggtgtttttatatgaagacagaaacatacaagaggaaaggttatgaagacagaggaggcagaagttaggataacacatctgcaaaccaaggcacaagcaaagactgatgggaaatgacgctatgggaaatgaggaaagagtacagtacagactcctccagaacttcctggagaatccgacccatcagccatcttgatgtccgacttctgatctctagaaatataaaatcaatatatttctgctaactgaagatactcagtctgcattttgtatagtagtcttttcagcccaagttggtgtcaaggtctatgcttctggttcttagccccaactgcctaacatcatattcccacttggttattgtattagtcatgtttctccagagaaataaaaacaacaggaggtgtgtgtgtgtgtgtgtgtgtgtgtgtgtgtgtgtgtgtgtgtgtgttttatttaaagggactggctcacatgattatgggaggtagcagggctgaaatcagtagggcaagctagccggttggaggtttggatgggggactggctcacatgattatggcagggggcagggctgaaatcagtagggcaagctagccggttggaggtttggatgggaattattgttgtaatctttactctgaaggctgaagtctgtgttgcagtaaggaaatagaattccttcttgtagaaatttgtagtctacaaatgatgaataaaacaacatttaaaacatgattttatactcaaacctagattgatgtttgaataaacaactgatcaccgaagcctagccaaatcgatatataaaattaatcatcacagaagccaaaacaatactgtggtaacacagtattacctataatctgatgttcagaggggaaacatgttcaaacaattgtatttgtattttcaacttcaaatcaaaaataaataaaacaacaaaaagttctcaaagaatcaaaaaaattgattgccacaaaaaaaacagaaacaagcaaaactgtccatcccctctctccacttctattcaacacaatgcttgaggtcttagctagtagaataaaggaagggagtaaaagaaatgcaaatactaaaagaaatcaaagtagagattgcagataatatgaatctaaatgtaagaggcattgtccactggactacaaacttgttagagctgctaataaggttcagcaaagtggcagtacacaaagtgaacacacaaaaacaacacacttcctaatatccatgacaaacatacttttatcattgacactgaagagtaaaacaggcaaacaaacaaaacaatcccattcaacacacacacacacacacacacacacacacacacacacacagcagagcacatacacataattaaagacactgaataaggccacagtggcacaggaaggagtatcaacaatcaacagacaagatcttatgaaactaaaaagcttctgtacagcaaaggacactttcccacagaatgaggaaaaaaaatacacataattaaagacactgaataaggccacagtggcacaggaaggagtatcaacaatcaacagacaagatcttatgaaactaaaaagcttctgtacagcaaaggacactttcccacagaatgaggaaaaaaatctttgacagctatctttctgggtgtggatgattggtgactagaacatataaagaactcaaaaagtcaaacattaagaaattaaacagttcaatctaaacataggctatggaactaaacagaaaatccttagaagaaaagaatatacgtgaccagaaaaaaattcttaaagtgttaaacctccctattcttcagggaaaagcaaactataattattttaaaattccatctcaccgcagtcagaaaggctatcagcaggaatacaaatgtcaaccagtgctggtgtggatggagcaaaaggaaacacttttgggaaatagtgtaatcagtttgaaaggttcttaaaacctggacatagaacttgcgtatgagccagccacaccttcctgggtatctacccaacagacttctaaccccctagaggaactcccacttgcaggtacattgccctgccaagctctcaaattctgggggggatttgtttgttagctgaatttcttgttttattttctgtatgttttgtttttggtcacggatcaccccagtcgggtataggagtccctaggattagggtcctcgaagaataggtgggtaaggattcggtggtgacaaacagaaacaaacacagaggcagtttaaatcagagttctcaaagaaggttttttatagagatattttctcaggggatgtttttgttaaacaaacccaaacatatgacattgttgttacttggcacagtgacactgaaatccaaaacatagaatcatccagggttaatcaaaacaaaattgtccttgattaatcaaaacataagactgtccttgattaacataggatcatccaaggctaaccacaatttcttaaatcaaattaatatattttatggtaagttattgtttaacatctattacctagttcttgtgagtttttgaagtattgagctatttttactattttaactctttcttattaaaagcttttgttaccagacacttaagcccactttcgatgacacatgaacagccatatgaaattttattgttgggaaagcttttactatttgtacttatgtgaatgtcgtgaatgatttggaaagtgctggtttttcctgagatggggtcatggctagtgaccccgtctcaggggatggtttcttatctgtttcttttgtttaaaacatcagcataggtttgtaggaacattttgttaatgcggaaaaaaaaaaagaatagaagaacaaacagaaattgccacgagaatcacagcccaatattttttctctggctgagggttccagaacagtttcaggagacctccttcttttgaagttgtctcctcagtctgtggaacttgtcacacagaatctactggatttggtgtggcaggttttttaagtttgtttttttcattttgcataccagccccaactcccccttcctccccctcccctacccctcttcctcattccactgcatccaaaaagtctggcataccaagttgaagcaaaaacaagccccccccccccccccccccccccaaaccctgagcagggggcccaccccaaaaaggccagttcatgtactcaggataagtcctggtcctgctgccagcccctccccatcaggccacataactgtcacccacattcagagtgtctagttcagtcctgttttaaacgtcttctggatggcaaagagatgcaatgacttcatttcactggggaaaggtggagccctagggcagcaaccctctcaccaatcattttcatcaaagctcacctgtacgatccccatggcctggtgtctcccagggctcttggcaagtcctcaaatttccttcctgtttcatagcatacccatatatttgtctcttaggatattaaatcgtgaatctttaaaaatacatttttttttctgatccttgcattcactttggggttttgcttctggtgtgtgtgtgtgtgtgtgtgtgtgtgtgtgtgtgtgtgtggggggtgtggggggggtgtgtgtgtgtgtgtatgtggtgtgtgtgggatgtgtgtgtgtgtgtggggtgtgtgtgtggtgtgtgtgtgtgtttgtatgtggggtgtgtgtggggtgtgtgtgtgtgtgtgtgtggtgtatgtcaggtgtgtgtgtggtgtgtgtggtgtgagtgtggtgtgtgtgggatgtgtgtgtgtgtgtggtgtgtgtggtgtgtgtgtgtgtgtgtgtgtgtgtggtgtgtgtggtgtgtgtgtgtgtgtgtgtgtgtgtggtgtgtgtggtgtgtgtgtgtgtgtgtgtgtgtgtggtgtgtgtggtgtgtgtgtgtgtgtgtgtgtgtgtggtgtgtgtggtgtgtgtgtgtgtgtgtgtgtgtgtggtgtgtgtggtgtgtgtgtgtgtgtgtgtgtgtgtggtgtgtgtggtgtgtgtgtgtgtgtgtgtgtgtgtggtgtgtgtggtgtgtgtgtgtgtgtgtgtgtgtgtggtgtgtgtggtgtgtgtgtgtgtgtgtgtgtgtgtggtgtgtgtggtgtgtgtgtgtgtgtgtgtgtgtgtggtgtgtgtggtgtgtgtgtgtgtgtgtgtgtgtgtgtgtgtgtacatgtggaagcagaggttgctgtccaccgtcttttttgagacaaagtctttcactgaagttggaatttaccagctcagctaggctgagtgactggtaagtccctcacctcctcctgcctgtgcctgtcccgcgcgatagtctcgccagcaagaaccacacaggacattcggatccttctgcagtaaagctttaannnnnnnnnnnnnnnnnnnnnnnnnnnnnnnnnnnnnnnnnnnnnnnnnnnnnnnnnnnnnnnnnnnnnnnnnnnnnnnnnnnnnnnnnnnnnnnnnnnnnnnnnnnnnnnnnnnnnnnnnnnnnnnnnnnnnnnnnnnnnnnnnnnnnnnnnnnnnnnnnnnnnnnnnnnnnnnnnnnnnnnnnnnnnnnnnnnnnnnnnnnnnnnnnnnnnnnnnnnnnnnnnnnnnnnnnnnnnnnnnnnnnnnnnnnnnnnnnnnnnnnnnnnnnnnnnnnnnnnnnnnnnnnnnnnnnnnnnnnnnnnnnnnnnnnnnnnnnnnnnnnnnnnnnnnnnnnnnnnnnnnnnnnnnnnnnnnnnnnnnnnnnnnnnnnnnnnnnnnnnnnnnnnnnnnnnnnnnnnnnnnnnnnnnnnnnnnnnnnnnnnnnnnnnnnnnnnnnnnnnnnnnnnnnnnnnnnnnnnnnnnnnnnnnnnnnnnnnnnnnnnnnnnnnnnnnnnnnnnnnnnnnnnnnnnnnnnnnnnnnnnnnnnnnnnnnnnnnnnnnnnnnnnnnnnnnnnnnnnnnnnnnnnnnnnnnnnnnnnnnnnnnnnnnnnnnnnnnnnnnnnnnnnnnnnnnnnnnnnnnnnnnnnnnnnnnnnnnnnnnnnnnnnnnnnnnnnnnnnnnnnnnnnnnnnnnnnnnnnnnnnnnnnnnnnnnnnnnnnnnnnnnnnnnnnnnnnnnnnnnnnnnnnnnnnnnnnnnnnnnnnnnnnnnnnnnnnnnnnnnnnnnnnnnnnnnnnnnnnnnnnnnnnnnnnnnnnnnnnnnnnnnnnnnnnnnnnnnnnnnnnnnnnnnnnnnnnngggcagcaagtgcctgtgcaaccactaccttaccttttttgtttgggttttgagtctacacacagtcccaagcataaacaccacaccactgtagagaattgtgccaaaaagtcccacccccacccattccttagcataggagacagcgaagcgatccatgatgacaatccctccgtcaaggacaggagttaatctgnnnnnnnnnnnnnnnnnnnnnnnnnnnnnnnnnnnnnnnnnnnnnnnnnnnnnnnnnnnnnnnnnnnnnnnnnnnnnnnnnnnnnnnnnnnnnnnnnnnnnnnnnnnnnnnnnnnnnnnnnnnnnnnnnnnnnnnnnnnnnnnnnnnnnnnnnnnnnnnnnnnnnnnnnnnnnnnnnnnnnnnnnnnnnnnnnnnnnnnnnnnnnnnnnnnnnnnnnnnnnnnnnnnnnnnnnnnnnnnnnnnnnnnnnnnnnnnnnnnnnnnnnnnnnnnnnnnnnnnnnnnnnnnnnnnnnnnnnnnnnnnnnnnnnnnnnnnnnnnnnnnnnnnnnnnnnnnnnnnnnnnnnnnnnnnnnnnnnnnnnnnnnnnnnnnnnnnnnnnnnnnnnnnnnnnnnnnnnnnnnnnnnnnnnnnnnnnnnnnnnnnnnnnnnnnnnnnnnnnnnnnnnnnnnnnnnnnnnnnnnnnnnnnnnnnnnnnnnnnnnnnnnnnnnnnnnnnnnnnnnnnnnnnnnnnnnnnnnnnnnnnnnnnnnnnnnnnnnnnnnnnnnnnnnnnnnnnnnnnnnnnnnnnnnnnnnnnnnnnnnnnnnnnnnnnnnnnnnnnnnnnnnnnnnnnnnnnnnnnnnnnnnnnnnnnnnnnnnnnnnnnnnnnnnnnnnnnnnnnnnnnnnnnnnnnnnnnnnnnnnnnnnnnnnnnnnnnnnnnnnnnnnnnnnnnnnnnnnnnnnnnnnnnnnnnnnnnnnnnnnnnnnnnnnnnnnnnnnnnnnnnnnnnnnnnnnnnnnnnnnnnnnnnnnnnnnnnnnnnnnnnnnnnnnnnnnnnnnnnnnnnnnnnnnnnnnnnnnnnnnnnnnnnnnnnnnnnnnnnnnnnnnnnnnnnnnnnnnnnnnnnnnnnnnnnnnnnnnnnnnnnnnnnnnnnnnnnnnnnnnnnnnnnnnnnnnnnnnnnnnnnnnnnnnnnnnnnnnnnnnnnnnnnnnnnnnnnnnnnnnnnnnnnnnnnnnnnnnnnnnnnnnnnnnnnnnnnnnnnnnnnnnnnnnnnnnnnnnnnnnnnnnnnnnnnnnnnnnnnnnnnnnnnnnnnnnnnnnnnnnnnnnnnnnnnnnnnnnnnnnnnnnnnnnnnnnnnnnnnnnnnnnnnnnnnnnnnnnnnnnnnnnnnnnnnnnnnnnnnnnnnnnnnnnnnaccctatatgacgccatggaataggcggggctaggcagtggaaaaacactgggcacatggataccaacgttgtttacttgatccggcagtggatgtcagcgccatcttgtaatggcgaatgtgagtgcggctcctcacatgtgcctgcccagtgctgggattaaaggtcacaccacaatgtctggctttcatgtgagcactgggcttctgaacccaggtcctagctctggcctgatgggttctgtactaatggagcccatctccctggcctggttttgccttctttttgtttttcaaaaacctcttaaaatcttcctctattttcatctctgttcattttctctttccttgtggttaagaatgtttgtaaatatttcactacttgctataccagatctgttgtgtaaagagacaagtatctgatagcctgggcaactcatccttttctttccactaacacattttgtattcttttaaaacaataaaagcctacctggtttaaatgctcagatcctgaatttggggttagataaacccgttttaaattctagggttgttattttacgagtatgtgattttctgcctgtcactcaactgtcctgccaagtctagcagtcacctaaaaatgcattgattgaaaagcatctattgaattggataattagaaggtcattggtgaccttcactgggtgccttccatagagtgatgagggcagaagccaggcttcactgggactcattcattaattgtgtttctgccactggattgcatgcctgtctcctccagcagtccccagcagagctgagagttacctgaaccttgtggtctctgcttattttgccagatgctttagtatttccatgtgctgccaggttgtaagcatgcttttccttcaaggctcatatcagccagctgttgcaacaagcttcaaatgctccctgcaaactgacgggagtctgaaagccctcagaggtctgaagggagcaggaaagcaaaagagcagcaaagcaaaaggttgcttagggaggcagtgtggaagcatgaacaggggtggagaatatcttgacaataatatcgacaaaaagaagggaaaccttgaaggaaaaatattccagcaagaaaagggaggagggaaaagccattctcagaattctccacctggccctctctggtttgccaaaccccctgtaattagcaggaccttccaatataacccttgcccaaagcagagaagctgatggctaaagacgtgccatgatggaaggcagacgtgaatcggatagttcactttgtatcacttgcagttcttcctgggcaggagctgcctggagatcgtcctgctagggctcacttgcaggaggcttaggttaccctttgatggaaatttatttcaaggctctaagttctagtcagcactttcgaccctcacaggagatcgtcctgctagggctcacttgcaggaggcttaggtcaccctttgatggaaatttatttcaaggctctaagttctagtcagcactttgtttcctcaatcctaaaggactgtttgtttgttttctggttttactacacaatccattttcataaactattgcccagctgcacacgttgctagaaaactagcagaaacaaaatgtccttatttgttcagctcagaaataaatttaaaattctctagacttgggaacagtaaatgaaaggctgaaaaaatactttttagtacagagattcaatgccaacttagggatctttgtacctgagaaataattcttatgaatcccttttttattaaaaaaaggactcatatataaattgatataattggagtttattctagtactttctaaaaaatcataatattgcttataaaattctccatgaaagtcctcatcttaatcatcagtcagcattttattatattatcatccttaattgattgacgtttaatcacagtctttgtattttactatcccttgtctcataagaggcaattttctctttactgtagtttaacagctgatgaaaaagatttaaggaaacctataaacttaagattggttaatggtcccttataaaagaatattatacttctaggatccattgcacagatgtgatgctcaattgtagaaatgtgcatggggtttattaaattacagcacaaatcttcagtcttctgagttattgtccatgttgggattgttaggcaaatggggagacacattattgcttccagttgttcgcattactgtggtgcgagacagctggcgcattgctgtaggcaagtgtggcacttcagcagctgctgagaactgggcccaagtgaaggtccagctccgctgagtcagtgttgaccacttcatcaaggctttccagaacatgggaaataaatgaaccaagctggctgtcagagagcggggggacagcagtgaggaagagggctgacaaccgtgggggtgggggagtgggaattaccttggatgcatagagctccttgttacactggcattacttcctgggagccctgccttcctgtgcagagctgattatttacaaacagcctttagactttagttggttggttttggttttgagacaggatctcattctgtatctctctttggctggaactcatcatcttgcccaagtggccttcaaactcttggcaagtcccacttccgaagtcagacccttaagtactagaattctgtgattgattgattgagcctttgcctttggacattttcatgaggaagcactttaactctgtgtgctgatactttgtgttaaaaagttgctgttgtgttttcctttgctttggctttaacactgtagtacctccagatctcaaaataagggaagataacaagacaaacagaagtgcttttggttttggaatctgaacaacaacaacaaaaggccctgggtgaaatatccccattgatattgataatggggtgattgctcctaaaaccccatttttctcatttgcagatgagctatgtaccctatgagggtggcatgtcacagctgtgagcccctagcatgctgcctgggattccacatgtaagcagtgaccaccagttctttcactattgtagtcactgtcacttaatctttttatttgtttttatgtgtgagctgtatgtgcatgtgttcatgtgtgtgcccatagcatgagtgctcacgggtgtacctgatgcacatctggaggccagaggccaactctgtgtgcctttatcactgtctaccttattttttgagactaaatctcccactgaaccaaggtctattggttcactagactgcctggacagtgagcctgagccatctggtgctcagccttctccatgttgggattgcagatgtgtccaccacccactctcagtatttcatgtgggtgctggggacccaaactcaggttctcatgcttgtgtgtagcaagcactttaccaaccaagccataccctctccccattgttgacactgtgatttgagagaataaaaccaaagttcctaaaagttagagtgggacttggttatacccccacacacactaaattatttaaaagtatctacaaagtctcactcaaaggcagaaaaatgtcataacaaagaaagagcccaattttaattcacaaataagtctctacctatatgatgcctagaaagtaactctctacaggctttactgtctcattcctcccacagaatgggaacaataataatgctacttgcctactgtgattgttctggaaattaaagttcctgtatgtgtgcacaccatttatcatggtgtcaataaaataaagagcatctagcaaatggtatctacttaacgtaagtcctaactcttggattgtattctccagttattataattttcttactttattatccgagactgagttatgtttaaaatcctgtttctgcgtgtcctttgcttaggttattcctagtgtgaccagaaatttttagcaaaatttaggacaaaggtaatgtaaagatcattgtctggcaaacactcagtcacccaatactaactgaaagactatttattgtactcgcaggaagttccaggggaagatagggggaaaacacacctgggaggaaggaaaaacaggggtcaaagtaaacacaatcaacatcatataaaattctcaaagaattaataatttattaataattagtaaaatatattaaaaacatctaaattttttgaaatactactctactccagaaactgtgttgagttctcagaacacaaaaatgagttacagaacgtcggtgtggtcaggctaaataattgtccagataaatttagtcctgaaaacaatgctgttgctctgaaagctgctaacgcaggaggtttcagagtccccaaaaatgcagctcaaacctacagccgagggttattaaatgtctattgtgcattttcttcgctgtctctccactggcctgtattcccactctcctgtggggattgtctctcaggaaggtctccggtgtgctttccactgaccaagctagcaaacaaagcagcgtggatagtgcattttttggtgtgactttccaaggtccgaagcagatccaaaaggagctgtcctttcttcttgtcgcgaatcctttctagaatattctaatctaaagggcaacctccctcagtttcctcggaagtggcttccacctggaccccacctctaaatgactgacccaagcacatgaccatggaaactgctggttccattgtttatttgctgtttcctccctttgcacctgtgcctaaaataactgctgaccacgcaagtacttaataaatatggatcaaatttgggcaaggactcactattagggagtcagttacagctattacaaataataattgcataaagctgcaaatcctcagagaagtatttgctgaagacttgaaatcagtggtaactagagcttgagttgtggagccttgaaagaggagccagacctacggggcacaggagagaaaaaccaggctgtctcaggagggtaagcaccacaggaagctgagagctatgggcaaatgagtcacacaacttcttgttccaagtcttaatttactttcctaataccaccccgccccgccctggatttatccctagtgatgtccattgatgctatcaaggtccattgatgccacgtctctagtcaatggaccaatctttggagcggtctgaacggagcgtgaacatgtccagccacattctgccctgctcttgatttccccttcgcatcttccagccagtgcaaaggccttgggggtgtccagttcctctattgtgtctcccaaccaccatttcacctttaaactaccacctgtctttggttatagaaaaggaaactaagataaaagaggggggggagaaacttggctaatttagtcattttgtttgaaagatcaatcagttccctaggaaagatttttctggcaggagaatcggagtacctgggatccaaaagcagcgtctccggccctggcactccgttagctgtcagcagtaatcacacttacatcctcgttccgggcctccagctaggaggggatgcctttacactctccctgccggcttgcaaagctctccccgacacatgcacacacagacacagctgagtggagctgggaacaagtgcctggcaccaagatccctccagcaggtgtataccaactcgcccattctgtgcttggcacagaccatcaagacccaggatgggctccagggtgaggaatttgtgtacagctggataaatcgactgcaagttcaggagtaaagaccactgctagaacctgaggaggctccacattaaccaagcacgggtgtctcccatttccgtttgcagtggggtggcctcgccgtaacagacctctgccttgacttggacttttccaggaacgtgctagcttgaaaaacgcaccaacccgcgcacacaaggttacagtctggtgccttttgcccctcacctctaaatatttcagtgacctagcacagacttcattcataatgagtcccctgaaggaagccaggcagagctcagaacatgttgggttaacttttctccctgggcgtctgctttatggaatacagctcagctctgcattttcatagcagagtgtctgtgcctttgcactgagcccggagcaggagcgccttattaaaaaggacttctaggtacccttgggctggaggagagcctcaggccagggtaattaaaatgtagccttgaacaacatgaccatatgatgtgtgacctatgatgagagattatcaaatgattttaattgcagggagaaaagaaaaaggcatacacgtccacaacagtaaactgcctccacggccgcactttggtaaatgaataactgttagaggtgaattctcacacacagaaaaactcctatacactccgaaatacccccttcctactagtatttaagtgttgctgagtcatgtcaggttttgccacttaattcatttttattcctattaagttttgtttataagttttctgtgattatcaagcataaaatagaaatactctctctgtctctccatacccactgtccatttttgaaggagttaacacttggtccttgcttcttctcgcctttgatttcagcataaaatgaagagcagtttcttccacaaatggagcgtcctgagtggaacgcccactgaggacaggaagggatggatggggactgagcgttctgagtggaatgtccactgaggacaggaagggatggatggggactgtggaaaactatatgactgaacaaaagaaacagcagttgccaccatcaaccagttgtcgctatgttcagatgcgcagtccatgattttcaagaaaagccagagacaaagatgaaaagtcaaaatggagttcaaaacttgtctgaactattcatccctgattactgcatgaatcaaagaaagtcagtcttcatactcaatttgacatctttgctgcctgtatcgggtctaattttcaaagaaatccatgcaccacatccactcttcgtgtttacttcataagcagcatcatgcaacagagagaaagagagagagagagagagagagagagagagagagaggacctgggaacagtgccctgctatagtgggaaattaccaatacggagtcaggtagaaatataagggcatttaatagggaaaagccttacttacagagcaacctagccagccggtgggtcagcagcctgtaaggcaagaagcaaagagaaaccgaaagtgcaaacgcagtcacactcactctgaccacgccctcacaagcgtggtcaggcacacctgtagccagcccctaagtaggcgtggctacagctttccctacaccctgcacttcagcacttcagtccccactggccattatctttcttgtgatgggtgtgaacttctctaccttcctcactttgcgcaaaagagagtagaggaaattttatttgaccttctacgtatgctgcaaggtcccaatgtccaagacacttaagctcttctcctctgtgtccttttatcactttgtctgggtctacattttagcctgttgaccagctgaaagtattgattcacatcagtatcaaagacctcttcacaccagggtcacctggaggactccttcaaacagacttctgagatccgcccctgcaattccacaatcaataggcctgaggtggcccccaaaatctgcattcagctgccagatgctggtggtctggagaccacacattgctctgctcagggccgtggtggtttatgaacagctctccagtgctggcacggtgaataccccctccatttacagcatgaatggcagccactttggcttccttgtattcgtgatctgtccatgtcagttagaaagtagtggatgatccagagatgcccttgcagagaattctcatatctcaaatgcatgtagaatcaagaatcttggaaattctttcattgccacgatcacataattcaatgaaagcattttataaatggagaaacacgttgtagcaattggatcatcagtataagagccaagaccctccagcatctttttcttctaattggctaaaaagcatagttttcttctaattggctaaaacctatgataacaattaggaacttatttctggactatataaagtagattaaaatgctgggaatgaagcaaatacattctcaaaatatgctggacatccaacagagcaaaatattctgcaagtccactctcatgattggcatttttcttctgttactaattccacatgcctaggaaccatgacaagacaaaaaaaaaaaaaaagcaaaatatacctacttaagatgtttgtgtttccctttaaataacagagctttctttgcaggactggagagaataattattgtatttgcaaactatagtaatgagttacattaattttcaactcaagaatagataaattctataaagtaaaagaaaactgttaaaatattatatggcaatccttgcccaaacagtctttttcctttgttcagctcattgaaggccattgccacctcattcccactccttccacgactcgagaggatttcatctttcatggatttgaccagtgtctgttattagccgagccctgttttctgtgtcatgaatctagtagtcaatcaaggagttttaacatctgaccttgagaagtttctggctttgtgtgtactacagcagttttaaacaagcaaagagtgcagttgtagaccattgcaagctctgtaaaacaaaaacagagggtaaatgatagcaatgaggggagggtcctttaatagagagccaaagagtggcatttgatctgcctgagatggagacatgccagggtccagccttggctcgggttcaggtcctgagatgaggaagggatgtcacctcagggaaaaattctgatcatccggtggatgcactcaagggaccctgaataactcaagctctcttaattatacttgaaccgagttttttttctaccaggattacatgaacagctttattattgactacttttcacttttaagaactacatcataattattataaaagcaccattattcccctttatgcttccccaaatacaccttcccaccccctgaataacctcactgtagacatagagttcaggatttttgcaggccttaactgagtattgagccagacacatcctgcccttgcagcacttatgtcagctggcagctacttgtggttacaaagttaaaaagtaatagacataggtacaatgctttaaggacaacagtattcaaagccaaccaattctttcacatctgcaagatatgcttttatgcagttcccatttctacaggagggtcccatgactcagtctctctgtaaaaggcagacttggacaagcactcttttcccatctcattataccatgcttctttcaccaatacaagctactgtattggtgggaaggatctacccttcccatattttacattgcatttccccattgaatcttactagatcctattattaattctatatgcttggtgtacagggtacttaactctcaacagttggcactatgtgtattcctgaagctttttccctattctctgtatgcatgccttactctcctttccagaactgacagacatggctaatgttccaagtgttgttttctcatatgtacctaactgtctctatttagagtcagaaaggctcccaggattaggagttgtagttagtaattccagatgagaaatttgagaagcattagccccctgctgattctaaggggaaagcatttgagaaagaacagaatgtccagagaaaattacatctgttgcctatgtgacttacaaaataaaactaaaaactgacaaaaaatcagcaatataatgagagagaaaagagttgcatgaatttagcagagtcctgtgctaccctgcagtctactggtctttgccaagtgagagacggtcttccatgggtcttgcctcatggagaccaattggacaggcattctttggctgctccaatactaggctgcatggatcccaacagaaagagagggaaacctggacagaggactgtgagaaccagggcctggggtagaaatgggcatgccatttttagaagatgatgaaaaggccagtgtagatgaggagtgggaggagaggaggtttttatgtgttgctgtgataaataccacaaccaaaaacaaactagggaggaacaggtttatgtcagcttacgcttccatgtaacagtccatcactgggggatgtcagggcaggaagtgaagcagaaaccatgggaatagtgacaactatggtcaacattttcctgaggattttagtacacacaacataagactgaaaatatctagattccaatcactgctatccagtctttaaggaacttgaaaagtgtgactacttctaaacagaaacactgtcaaaatgtctcagccttgagctaactcagctattagaagtatcagacagtggctgtgaaacagctcttttactccataaggtaaagctaagagctctataaataagtgagaatggaagttcttgccaatgattatcaagtataagttaacttttaaaaaatacatgtaaatgtattatttattttaataaaaaatattttgacattaaaatttaattatatcattttcccaatccctttcctctttctgacccttcccaggtatccctttctctatatatggaattacatgcacacacatgtattcatatatatcccttagtatataaattctgtctgcctatgatttcagggtgtgacatatttggataatccttccacacttctactgtgcaactctttaacacagtccaatcagtctttttctgtcttagtaactgtttttacttcctctactcttcacttcttcccctccttatcccccttttttctacatatgctcaatttattttactattagtatttattttgtttcagtcaccatccattctttagtctattgttttcaagactttacatttaaaaatgtatggaaataagtcctatgtaggtggccagtgaaattccttcttgctaagtgcaatgacagtatcacccacactgttctgtgaatgtgtctttatggattacaatgccagtgaaagaagatggtcacctttccatgcctgtcatagtattatcacaatagcaaggaaatggagctaggctagatacccatcgacagaagaacagatactaaaaaagtatgtgcatagatatataacaggattttactttattacttagaaagatgaaattataactttgtatggacctgaaaaggaatacaggagatgatcagtctcagaaaaactagacatcttgctcatatgcagagattggatgagtagggttgtttggaaattacatgtaacacgctttggctagagtttaaactgtgaggcaggaaatgaccataaataagtctggtgaatctggcagataggaaataacatagccttgggggttatttctcacataagttcagctgtatgattttttaaaataaatattttattttacttttaatgtgtgcatgcgtgtgcaattttccttcatccaatctccacaaataccggcccttacaactgatgcttgttaaacatctgaatgcatctcagatgtcccttgctctcaatatctcattgcatttattcctcagaagtaccttgagacagatattatagagctgctgtaaccatcattttaatgatccaaagcaaagaaacaagagggggttaagtgattggcatgagaagatgaaggatgaagaatctaaatgcagggattttaatccccaaaacgtttcattgtgctcaaagaatttctttccacctatgcacactcagcttggacatcacctctggagcactgagcgccatcatcttctaagattggttagaaacctctggggggtctccctactcacttgcacctctcttataatagggatgatttggcagaataattatgttgatgtacaaccacaaatatagctcctaggtagtatagattctgtttatagaacttgatatctaaagcaccttgcaaagtgcttcccacagtagtcaccctgtaagtacttgttttgctaggcgtaaacagctttctttatgaaacatctgtgcttaaataacactgttaatccgtattcaagtctcctgtcagtactcaagtgtgtcttaaataaaaagaaacttgtacagtccccctcctatttcccaagattatgcttaatgctgtgatccctttcttgatcaaagtctgtccaattaaccaaacctaaaatctagggatcatccactatttgtctctcgtgatcaataactgattaatcagacaccaaatactgtcaaatacatctttgggtcttttgaacctttcttcttccctgtaaacccactctgcctgtgtttccatccattccagcaatattacaaggcattgtgatcacttacacatgttatcatttcctcttcttgccactgagctgcagtattcttgagaaaaaagtggatattgctttacccctgtatccctacatcaaggctttttgagtaataacttggggcatggaccaaatgatccaccttcacattctaatgactattagctcaaactttgtagtgacctaaggagaaaagttctctcagcaggaactatgcgtttgatacatgttacagatgttcagaaacatcccgtctattctctcctgctaggtgttttctaggattgcatttccttgcccagttgaaagttatgtgagcatgacttgacctcagtcaatgaaataaagttagataaaggctaaagagaagttttaggagacaatatgtgcattcacacacatggtcctctaacttcagtaatcatgatcagggaagtgtgtgagaatgaaattctagtcacatgaaatgtaaattagaaacataaactcatgttgaaaccccaatgggttttaggattggcagtgcaatgtgccttagcctgtcatacccagtgtaatatccttaagtgctggtgttgttgtttttttttcttttttggagtccccatgtttaggtgagaatttgtgtttgcccctttcctgtcccacagatgttcttatccatgtgaattaaaagaagtcttgaattggtactcaagttccaatctggcaatatacagtttaagaatcatacatagaagttgggtgtggtggcacacacctttaatcccatcactcaggaggcagaagtaggaggatctctgtgagtttgaggccagcctggtctacaaagctagtttccaggacaactagggctgttaatagagaaatcctgtctcaaacaaacagtatgcacaatgaaaatgtcaaccatattgacttgaaggataattatggctgttggtatgtaagaaagaagagtgggatggctctttggtttatgtcagcctttaccgtcttctgacttgaagcatgtatccagagaagaatgacaaatgttagatctgggttatttgattattacaacttcaagtgggaagcataatagcataactacacctgttaagcatttataatttgtactgatggcaacttgtctcagaagaagctacataggagccagtatttctcatcaccaggtcctccttgctagaagtaagacattaatcacaatttctactcaaagtatcccagaggtcttaattttttaattaaaacataattgtatataattttccctggcccgtttctccctccaacatctaccatctaccaacttgcttcctctcaaattcttgacttcttttcaattgttattgccatacacacaccacacacacaaaccacacgtccttcttagtccagtgttacttgtatgtataggatttcagggctgaccattttatattgaataaccaatgagaaggctcattcctgggaaaactgtttctcccagtcttagcattccttagttgcttgtcaatctttgtctaggggtgtggcctgtgaggttcccccttccgtgttagcagtctgctggtgtccttcttccgggcttgtttagcagccaaactgttgcggtgccgtgggtgcagctcccctgtgatttgtgggagcaggaactcatagtgtgcttcccagttcttgactctgggcatctttcccccattcgctttcttgatgctccctgcactgtaggtgtaggaattgtgctgtagatgggtcaactgggcctgggcacctcacgatcagttgctctctgcattttggatgggttgtggtcttctctaatggtctctgttgcaaagagaagttcattggtaagtggtgagagatttacttatcctgtatctatcttaactgtatatctatcttaaactgtatattgccagagtatgaagataagtatttaaattgcagttaagaattgtgctggtttagcaaagttatggtagtaggttgtcctccaagatgtataactctgtagccctgatagtcgggctaggcttgcagcaccagacctgacttccctcctggtggctttgaattcagttagatttccgttggttaccaccaagatacaagtgccactctcacaaccctagggaaatcttgccatggtgagcattgttacgatttataggcattactgccaggtaggacatactgtcactgagttttaaggcagtaataaaaattatagtgaatacactttgcatttttctaagtttccacttatgtgctcagtagccctactatatacagatgataaatcccatgagaaagaaatcagggaaacatcacccttcacaatatccacaagcaacataaaatatcttggggtaacactaaccaaaaaagtgaaagacctgtacagtaagaactttgagactttaaagaaagaaattaaagaagataccagaaaatgtttcctagagtttctaatccttttctatttcattttcattcttattttcctgcttatggtggtctgcttctgttctttatatgcttgccttttctttgatgtaacagaaccaaatagctggcaggaagcaacctaagggcagaagtgtttattccatgcaacgatttaaggggatccaatcgatcatgtcgagaagacacagcaccagccaggtgaggcagctggtaacactgcacttgcagtcaggatgcaggaatgacaggtgctggtgtccagcctgctttctccattttattcagactaggacctctgcccagagattagtgccatccacattcagggtgggtgatcccaccttacagacctaatctcaaaatttcctcacagatctacctagaggcttgtttcctccaggactggagttcctgccaggttggcagtcaatataaaccaccgcactcactttctgcctgcactcacagaaggtcggacagctcttctcctctgtgaaataggtcattggtcagaagaggcttgccattgtacttcagttcaaacaaccactccttgaaggaatacaagccaagctccacatagcactttttgttgggttgtgtgtagcagacgtaccctgtcaacaccaactccattaactcttggttccctcagacaaaactatgcctatgttaaaacattttgttcatcttccatggtaataccattctgctttgcctgacttgccttcttgaaaatatttctttctcatactccagacacagacttccctaaggacacttgttgttttatttttatttatttatttgtctgtttatttatttatttatttatttatttatggtttttgagacagagtttctctgtgttgctttggagcctgtcctagcactcactctgtaaaccaggctggcctcaaactcacagagatctgcctgcctctgcctcccaaatgctggggattaaaggcgtgcaccaccatcgcctggctgacttcgtgttttatttgtctttgtgcttctgcttgctcagagcctaatacaccactttcagattagaatgcatgaagtcacactagacactatggaacagaaacagtatgaaatcccatcacctgcatttaacttcaaagaaactgaaaagtttcgtcttaaaaacaattgggcaccaattgtatgtcaagaagagaatccataattcaaagattaactatcttgtatctattggagccagatggagaggaagaacacttcttaaagttttctaaagcaatcaatgctatattctgcaggaagggaaaatcatctccactttgttctcacagaagccagcagtcttcaccagccattggatggcactagggggctctaattcatgattcatatgccaggatgaattagtgaaattaatggaaattcttgaaacacttccagggtggaccacctattttcagccatgtataaactggacttcgatcctcagaggatttctttggattcagctctgacccttgagaccatcaccacatagaagcctggctggggtacctgaagcccagtatgcccctgggtaacatgcaggcttgtggccatatggtgtccccagagcctgctgtcctctgatctatgccagaataggcatatgctgggatatttcaggaccctgaggggagagtgaaatgtcatagcgtgaggatgatgaggtgaggcttccatttctcttgtttatggcaggagtagaaattcaaggaggagaagtaaaagacactgctcttgattctaaagcttgcatagttcagcttaggaaacacaagacagaacttatgggttccctggggaacaaccgttttatttattttaaataagcttaaattttaaaaaatgacagcagaatccagttttgaattttagtcactgggcctctctcaggtcttgatgtattcatgctatgaacaaataaatacgtggaatatagtttactggtgatgactttttccttttgctgtttgtttggtggggacttaggtcaggggaagagatgcctgaggaatggattcattacttcaggagtttgttgtggctaaaaagcatagactttttaccattttcctctcaagttccttatgaacaagtgactgttccattcagttgctttgagatgctctgaggcttgtgtatggggctaaagaagcccggtccaagggggtcacccttcccgacaagcattctgacagacaatgaaggtggggggaaaccacagcttggggagtctgtcagatggtgaggaagaaagcttataacgaaacccatttcttgagaagatatgagcatggacacatagaggatcactggggagagagctacacaggggagcatcaaaaagcaggcgctgtgtttgcacctgaatgagtgagaaacaaatgcaagaaagtacagcacagaagttgattttattcctaactgaaggttgcctgattctagaaggttcccttcactgcttcagaagagatggtcccatttgcgagcgttcacaagctgtgactgcacattgatcatttgtctaaacactgtttagtgtggctaacaaagcccgtgatgcatgctaaacccagtttcatacagtgaaatggtgggctttccttctcgggatgaaaaaaacaaaacaaaaactacttttagattcatgtccttttcattttggtacagtgaagcattatataaatccaatttttgccacatctgaaacgttggctgtcattttaaaataatacacatgtacattttgttaattgaccaaataaacaaacaaagacagaacccaaaataaatgaactcttctagtgactggatataaaagtatggtcttcttcatatgatggttacaaatcagacagagcaaaattcagagcacaaggctctgtgtaggctctgttagccaacagtttcttgcaggaagataattagggcctcactagaatctttctaaagcataaagcaaaataagggttaagggtacatatatacatagtaaaggacttgcctgacaggagcagggtcctgggttacatccataactccacaaaaacaaaaggattttactttattttttgtttgttttttaattttttaattttaattagaaagaagattattttacatgtcattcccaggtcactcttctccctcctctcctccccctccccccaattaacaccctacctatcccataccctttctgctccccagggagggtgaggccttccgtagggggtcttcagagtctgtcatatcctttgggatagggcctaggcccacccccttgtgtctaggctcagggagtatccctccatctgggatgagctcccaaattccattcctatgctagggataagtactcatccactacaaggggccccatagatttccgaggtctcctcactgacacccacattcagggggtttggtcaatcatgctggtttcccagttatcaatctgggaaccaagagctctttcttgttcaggtcagctgttgttgtgggtttcaccagcctggtctggacccctatgctcatctgtcctccttctctgcaactggaatccacactgccagagaagctagtaaacaaggaggattttaaaatagtagaatttcatcttacccatacatcaaatgactcgcgccgttattctagcattcaggaggggtggcatgaggattgccatgattggaggccagtctggtttccggaattagttaccagacaatccaagttgcagtgtgagaacttgtctcaaaaaaaaaaaaaaaaaatcccaaatcaaataagagtatgacatagatgtgtgtgtgtttaaaaagagagataataaaaaaataaaacaagtagttttctatttctagatatgtaaaagagattgtgttatgtagttgtgaacagacgcaaaagcataaattaatatacacagtccaagaagcagttatctttataaataaatccgttaggattcaacattgacgctgacagtccttggtcaatgttaagaccgcgccaccttctggtcgccacgtgtatgacagctgcatgtttacagactagcatttttgctttatgtaaaacttatattgaaggaaaacaacaaacagtcgacttgtgcggtttcttctcccccggggatgcagtgggatacgaacacaattcctaaatgtactccagtggctgctgtacttgaaaacccgagacttgctttcgagcttactccactgtaatggttcacaacagaccacacacaaccagacagggctgcgattttaagagctagagggtttggttgcctgtcttttccctggttgtcagtctctgaacttcttacagtctgagaaacggcacttcaacaagggaagtcgagcctttgccaggcagggaaagcagatgcggacgatgccatgtctctccaaagcaaaacaataaaaaacatgtaggctattttctgaacaactgttaggacataattgtggacaaatgacgacttggggaattatactctgcttaaattcctccatagttacagttagataagtagtgttgccacggccttcgacgacccagctgtaaaacaaggagggaatgacatacctttgctaacaagcttagcggacctatgacctgcaattttgagcatgcttctcccataatttgcatatgaaaactagtgcttgaaaaggcaatcacagccaggcagtgatgtcacatgtctttaggcctagcactcaggaggcagaggcaagcagatctcagtgagtttgaggtcagcctggtctaaatagcgagttccaggacagttacacagagaaaccctgtctcaagcaactgaagaaaagaaggaaggaaggaaggaaggaaggaaggaaggaaggaaggaaggaaggaaggaaggaaaagaaatgactatcacaaaggcaaggtatttccccatgtgcaccccatgtgtattctttaggatttgtatatcttaatcagaaatagtatcagaaaccttgaaatcttatattcataaatatgtatgaagaggcaaatacattgacaggagaacagtaaacttaattcactgttttgtgactttcccctagtaaattgcttgagatttcttgggtaagtggccctgtcattctgcctgctgcccgcttcagtttgtcacccctaaaaacaaaccagaaagttgatactaaagaacagaaaacactgtgattttactgtaaccaccaagatcttttccttaactttccatttcacattaacctgtagacgaaactttagctttcctaaagaaaacccacttatgaatctacaagtaaaagaatgtaggagtgtttggggaaaggagggtacaggcttaatcaaaactgcaaagtcattggctttcactggtgttgggatttgcttcatataagatttaattatggctgggtggtggtgaggcacgcctttaatcccagcactcgggaggcagaggcaggaggatctctgtgagttcgagaccagcctggactacatagtgagttccaggacagcctccaaagccacagagaaaccctgtctcgaaacccctcaaaaaaagatttaattatgaagagtaaatatttcaaagggaagtttcaaaagaacaccccatggctaccaagatggctccgtgtgtgaaggtatctgcccctaacctggtaaccctggaacttacatggtggaaggagacaaccaaatccttcaaggtctcttttgacctccacacactcacacactaaacaaataaataaaatgtaaaaagagtaccttaatttttaattactcgtctgatggcattctatgctgaaggacgcacaggagtgctttataccacagaactaaatgacccaagtgtgagactgacagggatgaatgcaccaggtaaatacaacctcttaacatacaccaaacacgggtgcaatgtagaagccaagtgaaggaactcccaccatttgagaatcaaggttaccgatgatagaaacagtcttcattagtcttcagcagaatttcacaggttcttggcaatgtgaatatatcaacaaacaagggacgggaaatttttcctctagttagaaaggcaaccgataaatgtgaaggaagttaggaatttccatttggaaactgtcagaaaaactggttcagagatgagtgattaccaggccctacaaccaataggccaaggtttgctggtatgcaacacaggaaggtgaagtgaagaaacatagtaagttcccctggcagtcaccaaagcctcagcagcaggctgccttcacatctctttcttcctaataccaacagagctttctaaatccacggactacatgaggtacattctatgaaacagttggcttatgctaaaaactaccaagtcagcatcacaaagtgcaaatgaaaacctaaagtctgtcccagatttaaaaagactacagagacctaacaggcaagtatagccaggaccactggtttcttcctcaggacattaagttaatttggaaaatctgtcccaattttactctcctggctttattaactaagctatggtttcataaaaattactatttttgtaatatacaagctaaaatatttagaagtaaatgagcttcctctttataatcagttgaaaacaaaacaaaaagccagagcaaatattgatgttaatggaattatgtttaagagaattcttccaggcaaatggatagaactagaaaaatgccatcctgagtgaggtaactcaaatccagaaagacgaacatatgtattcacttataaatgagtattagctgtaaagtaaaggatgaccatgctaaaaatccacagtcccaaagaggctgggtaacaaggagggcccaagggggacatctgaatctccctgggaaagggaaatagagaagatttcatgggtgatctgggtgcgggtggcaacgggaacatgagggagcaggtgggggtgggttttgggaggagagtactggaaaagtccactagaaagggggggcgggcatttcagagtcagggagaaaactggtacaagggaaactccaggaatctacaaggatgaccccagccaagatatgtagcctgaactggtcatctcctgagaccaggcaagactcaagtgggattgggacatgacacaaccacataaacttcaacatacagtctgtcctgcctacgggatgtactggggtcagggtaacacagagactgtggaaatagccagtcattgactggtccaggagtgaacccactcctgacactgcctggagccccaggacacagagcctgggtggccagagacctaggaaagacgaaacaacgggaggaaaaagtgtcaatgtaactatgcctaataatatcctgctgtgatcatagattggagcccagtccaacagtcatcagagaggcttcatccaacaactggtggaaacagatgcagcaacccacagccaaacattagacaagacttggggaatcttgctgaagagagggaagaaggattgtaggagccaaggggtcaaggacatcacaagaaaacccacagaatcaacctgggctcatagggactcacagagaccgaaacaacagtcagggaacctgcatgggactgacctaggccctctgtacatatgtgacagttgcctagcttggtcttctggcaggactcataacagtgggggcagtggttgtctgtgactctttggctggcttttgaaaccctattcctcatactggattaccttgtccgactttaacataaggtgaggtgctgagtcttactataacttgatatgccatgttttgttgatatccaaggaaggcctgatcttttctgaatagaaatgaggaggagtggatcagaggggtagaggggaggtaagggggaaggactgggaggagaggagggaggagaaactgtgactgggatggaaaataaattcattaaaaacaaataaataaagctacactgataatatttctttcaaaaaagaattcttcagattttttctagcaatctttctacaagtctaagactttcaaaggataagtttagtaaaaaaaaaaaaaaaagtgataaaatgaccttgctttcactgatgagtaaaggtggcacacacctttaatcccagcacttgggaggcagaggcaggtggatctctgtgagtttgagaccagactggtctacagagtgagtttcaggacagcaggactacacagagaaaccgtgtctcaaaaaaaaaaaaatcaagacaaaataaaaatatactttactttttatttgtttaggtaaaactctgacaactagaaatccatctttaattcaaaagatgtgttattttagtctcgcatagaccgaacttcaaacagttaggtgaaattggaaagcatgtccatgtctttttgaagcaactttccacgcccagctgtgtcagtgcttcatcatgtatttcattcaaaaatcctttggatgtcccatttgcaaccagccagtgagtcagactcggttcccctgcctaagacacacacagctacttctggagagtctatgtaagtgtaaccaaagtggaaacaccaatgggaaaaaatagtcggtgatgttaaggagtctggaaacaacatcctgaaggcacaagttagggaactgaagtagctagagggatagcaggtgtgtgctttgtgctgggttctccccaaaacctgttattgtcaatgtgcttggtccaagggactgatgagaattgcaaagcatgctgggtatggaccagaacctgttcttcactgtaaatctgaccctgttggttggtagtgaggagcccctgaaggttccaagcaggacaggatcctgccaggtgtgtatatcatggtgcttactgctccgccttccacgttggttctttcactcacttatcaactacttccttatcaaatgaccctttaagatgagctgctacaccatggaacacatgacaaaaacaaagtatgacttccttttcaacattattgcccatcctagaatctctgtgcatgtttttcctgtaggacaaattacttatgtttaaatgcctctgtacattgtactttaatctgttttaatgagtgtgtatctctgtgtatgcctttgagtttgtgtgtgtgtatgtgtgtgtgcacatgtatgtatgcacgtctctgtgtgtatgcatttgtgtttgtgtgtgtgtgtttgtgtgtgtgtgtgtgtgtgtgtgtgttaacgtctttttgaaactctgaaacttgctgtctttattaagctgatagaaggagaaagcacttgaagctaactatggggcatgtaaggcaaaatgtattttccctagccagccttgaggcagccaatttaaattttacagagcacttacactcagtgccagcaggtgatgttggaagtatagatttccttaaagcatcttttcagttcattgacttaacaacattcctgtcacttacgtatataacataaagtaattgtttcatttatataactttgaaatataattagctaatatttaattatttatcacaatgtggcacaatcatttatatttccttcttaatatactaattatgttaacagcctctaagttctaagtactgtagcgttctgttttatggtgtttgaaagatagcaatgtacagaacataaatttcactatgtgaattcacatattgtcgttattttcaaaatatgatctttattgcaagggtcagcagaggggaaattactcagtttagatttctccatcaaagattccattgtatataaaatgtttgcttggcaagagcagtaaatgtaaggatgtgagcatgcagagggtggccccagggagatgggttgggtgctcaggaaaacagcacaggcttctctaactgacaacatacataagggaggtttgtttgtttgcttgtctgttttgaagctgagttggaaatctgttaatgacagaacattattccagaaaagcataaaagtatgcgtattccagataataaatgttggtgtttcaaagaaattctagtgcattaaaaaccattttaatgtccatgcattttgactttatatttgaatctttgttctatttctatcagacaatccagacaactgctcagccacctgtggcccagcttccttgtatataaaatgcaaagcagagtggtccatccttggctgtctatcttcttgtctcttgacacctgtcttgggaaaatggggattaaaaggctgttgagaagaacacactcattgctgcaactcacagtctggacttttgcctcgtcttttaaccctctggctggaatcatctagtcttgaaatcctacttcaaattttaggtattctagctcactttcaaatgacttttgatagcatcaaatttctgccttaaattgtaggcatataaaataatgttaatagttgtgactagtatgtcatgaattgacaaatacaccatgatttttgaagtccatagtttttttggctctgtcaagatagcacaaggagtttttttttttcatttggccccatctgacttcttcttcattcccaattatgggctctcatgtacaaagaggaaacaaacggattgactaaagattaatcatcagcagaaagtatggcaagggataacagtatctcatgtgctatgaacacaatggcagatgtcaggcccaggactcatatctctcttgctatggttgcaagttatttcccaggctctgaggaaagggcctccttgaatttcatgaagaacacagagggtcttgcatcttgtccatgccaattcaatgtatctgagatcctggaagtctattggcactttattgtgttatgggtaaattggtataagccaatttaagactccccattccagtttccttgccatggtcctcaccttggtgaatttaggcctctatatcagaggtgtcacagcataagtcacagttttcagtaatttcaagctcagagaagaaactgttgtctgtggtccaagctgacagctaatacctggtggaggaagcatcaaggcccaggcccctctctgttcctctctttccccactgtgtgtggaaagttacctggcctctctgaactgtggtagttgttattcatcatttgtcatttggagatggcaaaaccaactttaatgtcattgtgagagttttcatgaccatcttttcctggcaatctggcaaaaaataataatctcttcactaagtctcagttaccactcttcggttgctttaatgctttgtcagtttgaaccctcctaattgtgcacttcaaagatgagattgagtgtctttgttaaatcttaaaaataagtgacactcctatacaccactacgtatgcgaacattgatttttcaaggtaatcctttccctgggataataggaatggagcggaaagtgccgtttgttactctcagagggccgcgacacttccaactgagaggaaagcattttgattccccaccaaacattttcttctccctaataaagatacattttgcatatttaaggttttcatttttcccagtaaagatactgagggtctctaatatctcaggtgtgagggtgtcagaccctcagctcccacccaggacaggttctcaacctgttgggcatcataacatgtcatatcacagcatatcatatcataccatatcaggccatgcccattattattgtatttcaatatgagttcctgcagggtgtggccatacctgagggcagaggataaatttaatgacctcttgatgtctattccaactgaatgattccctactaagtagtgatagtgtcatggtactgtgaattttggaggccattcccaggtccacgtgctaacagggaaaagataactagataaaacaattgttgtgcactatttgctcaagtggttactgaggctaagatttcctttcttttaaaagatagttactccttaatgacatggaaaatggcataatctccataggctgtatttttctctacttgaaaccacgatcattaattcctacccatttacataaaagaaacacagacttagtactgaaaaaaaagagtttcctctgatatttgtatatttgtataccctccctgttggaaacaggagttcggtccgggttgtaggctgagtctcagggacctaaaggcactgccacctccacaggcatgctctgaagccggcactccagccttctctgtgtctgacaaaacccgagccctttccaagctgtttaactcacgattatttctcttgttgccttttctttgaaaattaatttcagatgtgaaatggccatgtttaaataattcattaaaaaaataaatccagaggaacgtggcaaaggtagggagaaacccagcgaagtacaaagcaggggtcgagttggatgtggctgtctgagagaatttcttactccagagtgtttaattaggcctgcctgtctgtttggccctgggttggttttgttctttcaagagagctgttgacctaatactgcagtaaaacacacggagaggtagcttctcatggttcaggaaaacatttgtaaatgctgtgattttggcattgaaggaaaaaaaaaagacagaaaagtgcgcctctaaccgagggaaattcatacatttataattgcattttttaatagtataggcagcttttcagctttacccattatacaaaccagtcagacaacattgttaaatgtaagcaactaaatgcccagaagaaccttaactataaagccaagcgcttctgcaacttttccagaatcttccagccagacaattaattgaactaacgcagtgaagtttatggcttctggcactgttgccatgcttacagaagcattttaaatgttacattcttaaaccttctagatcaattagtttgtgatagaagccaatctccaggtctaacattacttttttgtgctgatgtatcattttccataataagcattttttaaaagaactaattagtacctacttgccctagagaaagtgacatattgattagacattcacccccacgttgtgaggagactccaactaccatcttcatcccctagctcaagtttgggtgggcatctagaatagtacaagggaggggggactcaaccctgttgttgggaaagaaatcagagggtctgttgtctgataaactagctatacgctctactgtttttacaatcaaagctgcccaaagacacaccacctcaagtactcaataagtccattttaatttcccttccaggaaaacaccatggtgtttctccttttgcataatacaaatatgtttctgtctaatgctctgttactgaaaacacagtcttcaaagttactgttcaaaatatccatctggctggataagtgctctgctgtcttgttttgttttcccaagtctctgatgaggagatgtttgtcatttaattgctgctaaggatcacagatgatggtttataggtttaggcaaattgtggacagcactttgttcacaaacacaagagcatgccggtacaccataattatcctatagagctcaattggctcttaacagcacccgcccggccagcttcagggagtcttgtttccacacaaaggctccttcttgttaattaacctgtgtatgctcattacaaatgaaacctatttgttgccagttaatatatttgctgctacttgatatattcatttattcttatccttgttaagtggaggttggaggggaaacatcatttgggtgactcagatccctgggcttgaaaagagcagcaaatagactgacatatcagttggattgccctgtgctcagtgggcccccaaatctgcttaagaatgatgagtatctgtctctcaaccatgaaaacaaaacaggggcaattgagaagcaaggcatccatgacagaaaccagagacttttcattaggggagattcttctaagcaattcatgtgacgcttgacttcatttctctgtctgcctcctgactattatgtacgcacgtgcagaaaagattggatgtgggcaaatggtttggactctccttacggctggcctcagccaagagaaatcacatgtttgctcttggtgatgtagtaagcaaaggtagtctgaggctgacgagggcttcagaatagcatatgtcatgaggatagcaattgaaaatcaaagagagacaatatctatccctttcttagcagattttatataaaacccagatgtaaagtagctaattatcactcaaaattttatactcttagaatctacatttttccactgcttatttttaaaatagtcttagggttttggcgatttgaaattgtttttacatgttggttactcttcttccaaatttattttgggtatattcttgccatccatctttttcgaggtaaagaaataaactattttacaaattatcttaaatgataaagacttttcgcaagtggaaggaagaggctcctattcctaccaatatgaagtactaaaaatacaaaactttgagcattgctgtccagaatattctttatgctttgttgcgtcaaaagattgtgcttatgtgacttcaagtaagtgtgcttaactgcatacagtgttcaaaacacacttaaatattgatggacaaacattcccacagccaccaatcaattactttgattcttggattttagaattggtctgataatgcattttagaataggtcaatactgccttctacatagagtaatatgtctaatttgtttctattcatcatgatcatgtagttaagaacgatatgctttaaagccccaatttgtcactgagaagatgactatggaaaattgacaaaaattacaggcatcattttgtcaaaagacaacatgttctcatggatatgtgtatcccatgtgatacttgggatagagtatttcatttatattttttaaaaatattttattatttatttgtgtgtgtgtgtgtgtgtgtgtgtgtgtgtgtgcatgcctgtgtttgcatgtatgcatgcctttgtgtatgtgtgcctgtgtgtgccttctgtgcatgtgtgactgtgtgtgtgcctttgtatgtttgtctgtgtatatgtctgtgtgcctgtgtgtgtgtctgtgtgtgtgtgtgtgtgtgtgtgtgtgtgtgtatgtctatgtgtgtacctgtgtgtgtgaggccagaagagggcatcaaaccctctggatctagaggtacagatggttatcaagatctagtatgggtgttagaaacagacctctggcactcttaagcactgagtcatttctttcaccctcacacctaatacccaacacaaaagaaaccagggctatctttctgtgcatagactgaagcaccatttaaagaagctcatgattagaggagatgctgtgactcggaccttcggagatcccataccttctgaacacaagttcttccttagcagtgccaggtgtttactgtggacctgcatgggaagtgtttttgtccagaaactctgtatgacatctgttatcattgtactattgttactttggctactaccactttgggactgttagcataaaaggagcccccaaaaagggagcatggaggttcatcctgcctctttttaaaaagcctcagtcactaaagaagtcagagtcactatgtaacctgcgaaatgtgctgagttttgaatctgaatgtctctctgttttccttgtgataacagcaatctttgtatcttggttgaatatttttgttttgtcatgtcgtgattttccttagcagagctgtggggaaaggaggaaaactgaactcacttgactcctggtacacatacatatgtggtaaagttataactcttttataaaattggtgctgaatttacttcaccgtaataagcataaaattttattctcctacaaaatccatacttacaagagtgttcttatatcttttaggatttctttagtacatagaaagatacttaaaattcatctagacctatcacttatatgaacctttacatcacccactcaccacaccgttctgaggagaccatatgctgcctcaaacacctatgtacaactgcacctacttatgtaacacacaatgtaggcattttatctatgcagacgttttgtcacctattaatagcagtagactatataaatctagccctcaaatgtaaatctaacaatcacgtagtattagtaagaagaaaattttaacactcaattgtattcctgtaactggtccaggcttagctcttagctgaatactcataactgctatggtttctagacacacacacacacacacacacacacacacacacctcaataagcaagtatcagggcaggcagagcatgttgcaccatctaggtagaaaacaccaagaggtggtatagcaaacaaccacaggaggcgctcaacttgagccagactctgtaagaagttcagagggtagcagcatggagtgtagtagggaggcattccaagcagggagctgacaaaacttcagagatggaaatgccttaggcaagctctcatggtttggaagtgcacttttctttactcacatcatcaaagttcgaacaacattttcaacataaggagcattatcatcaaattatcggtgtcttagcagccatattgccacaattaatctattctaataggccactcaggcatgaagattggagattttctgtttttataggcaatttgatttttcagctagaatattttatgacctacttcctacaatatgaagtgccatgagaacactactctcatgttgctgcttaaatagcaaggtcatgacagttttctcccgtctaccatgtagtcattcactaatgcatgcagacattcggtcagcaacccagatcaaacacctactatgtgtcatgtctacactgagccataagcagtttggacaattcggaagaacacctctcaccatctctaccagcagtggctatgaagatactgacgggattaggcaattgtccaaatgaccagcccaaagaatttcagatggtggcagtaatggtatgagatagcaaagggcagtaactagccaggaaatattcatgactgaggtcctcgtgctgcaaaaatttagatgatttcctattggtgactgggaagattagaactgctttgtatcctatccaaacagacaacttctacaaagtagggttgtttgggaatatcacactgattttgaagcaggcttgtgtgtttagagtaaagaccagctgtcatctgtctccatatagtattgactctcatcttgcaaggttattggggcaatcagtaagggacaccagccctgctgtctgtaccagcagaaagcttagcttctaggctttggggtaatttactaaaatcctaaatggggttttccaggtatgtagttattaataatgacatctaattttcttctgtgacatacaaaaattacacagtcacattaacactcactgaattctgctaatttggtcaacaaaggctgacagctgatatgtcagagaaatggatcgccatggcctggtagtcaaaagggaaggctagagcccaggccttcaagttcacctccctcatctgtaaagtatgtgacaagaacaagtgtctcatgccctctctagggcttcaatgaggacttatgaattattatgtgtgaaatggctagaatggtgattgccatattgtccattgtatcacgaggaggtcactgcagcataaagtagaagccacggattaactgtacctttaattgagcaatctaaagacctttcagtaggatagaggatttttggtagtctataaaaattgtatattgttatttaactaaaatgttgatgcatatattataataaaaatttggtgacaaaaacactgatgtatcctgtgtgtttgtttacttaacacatcaaccacagaagaattgtttcttacactcccatctttatgacttttaaggaataaaagattccaatgtattaataaggtaaagtatcttaattgtttcttgtcttttcatactacgctattctaaaactgcctttgaacataagtccactctgtttctctccaactatgtgtaaaagataacaaagatatgttgtatttggctgtgccacagggttggataaaattccatatacacagtagtgacaatgaatgtataacttgaaaaactgctgctgaataataggacacattaatttgataagatttgactgttggcacttgtgctgggcattgagatctcaggaagctccctgaagtaaataccttgatagaaggatcaccatggactttagaaattaaatacaaaagattatgttaatgcggcataagtgggaacatgagaaaatatcaaagttgaagttttagttggaaaatgaatttgaaatgatcgcttatgcatatgcaactttttaattcatgctctctgaggtacatttacactcgcatttagaagtctaattagtaataaaaagggaaacgttcctaatgatggcaccctgctcttagggtccccattatagattctgaaaacaaactcattaatatcttaatctacacgatgccattttctgtacttaaatacttcagcctagaagacataagctttacgtttttatttgcatttagtctcaaagtcagaggcccatggattctatgtcttttaaaaccaaacttttgacatattttccccacaaaataaaacattcaaaaagagaagtagccacgatgttttggaatgtgtgtctttttctaatttttcctgagaaagctaacaggcatttgaactgggagtcatcagaaacatcacttctaaggcttctcttacagtctgttgctggtagactgactgctccttacccttgaggcagctcaacaattgagttaaggaggtattcatgtatctgttctgcctgtcttatggttggcttaacttcaggatatactttgccactgaaggttcatttccttcaatatgttaagtgcttaattataaaggttcacaaaagaattgacacaagcgagaggggctgtctactaccagcctccccaagagacctgtacaagtgtcatctgtagaagcagggcacaaattaaacaatggccgttaacaggctgcctatagctcagggtataatgaaaatagagtttttgcaaaagaacaaagccagctgtaaatgtgacttttctttctctctttttcttattttcattgacatctagatcctatagtatgtcatgcctttaagtttctgttggaaaatttattttaaacccaaactgtaacactgagtaaaatcataatttgtacctatgccgggacttagaatttcattgtactttttgtgatcagttagaaatgcctgtaaagttttaaaaagctggaattgtttcctgaataatcacatattctaaattaaagtaattcaaaacaatgagcaaaatatgagtattctgtgaagtaagtgtactatgagtccatgttttcgtcagacagcaccaggtgtcctgtttttagcagtgacaggtattctaagcaacagcctttctagcatttgaaaagcatgaacaacaaagagaacttcccttcctagggtctgagtgaggtaatggaacagactggaaatggctgcattgtttctactgctcatcaaaacatctctgtgcatagtagtcacgtcattatgtaagacatttgcaaatatgtataatgctttagcctatgggaaaactctcctgctctaatgtattcctgaaagatgaatgaacatttctttaggtatgataaaaagattcagagggctggatacagccatgatattaaaaccacaagctcatcatttaatttttttaatgccaaccgctaacatcataggtctatgttttactttcacttttttttctctgcaaattcaccacttctcttccagttcccattctgattcaagctcagcaccatcctgtttgcttgaggctgcctgctttgatacttcagcggggattctgtgaagtcagaagtattctttggcttcagatctctgatcagggtttctgcttgatctccggattttctgttgcctctgaaacagcttcgaaatttggccacgagcagatacccaccccattgtgttgtttacctgatgaacttagtatcagggcaagagctgtgctttttaggacaaatgttctactcagaaattgtgaaataatgcaaagttttcatttggcttctgaaagatagcaaggagaggcgatgggaggctaactcagctatacaagcatgaggacctgaatttcatctcagaacccatgttaaaaaaaaaaaaagctgagtgtcatggcacacacctaaaatctcatcgatagagagatggagatacataaatccctgggacactggcctatcctatgcagtgagtaccatgccaatgagactgtctcacaaacaaagccgatgactcatgaggaccagcactggcagctgtcctctccacacacttgttcatgggtttactgaagagatagtgatggatttagcacagtgaaagaaactgagatataaatgttggcagagatgtggttacagcacaggtaaactaaattgtcccataattcccagagaagtttgaggaaatagcaaatatctgatagatagaaagccaagtagataggttagagtgaaagaacagcaacagccactgaatatattatctcccggggagattataggatttcatttggtttggggtatgcattgtacgtgtgtgtgtgtgtgtgtgtgtgtgtgtgtgtgtgtgtgtgtaagggtatatatgtatgtatgtatgtgtatatggatatgtgtgtgtgtgtgtataagggtgtatatgtgtgtgtgtttgtgtgtgtgtgtgtgtgtgtgtgtgtgtgtgtgtgtgtaggggtatatatgtatgtatgtatgtgtatatggatatgtgtgtgtgtatgtttgagtgtgtgtgtgcgcatgatgtgcttggggcttgttttgttctgttctgttttgcttcgggaaaaagtgaacagagtctgcttctcacagcctcatctgtggcactcaccgatagcatggaatcaccaggcatttgtgaaaatacttcactatgtaacatataaaataatcacgtaagcaaaggaacccagagaagactgacaaggcagaaacataagcaagcattggcgagttaagagattgcacctatgaagcacaaattggatgctgtgagaaggaacagagaacactagcgttagagcaatgataacccttgagtggacagggaagttgagaccagctgcagtttagaatgagctttcttaggagaggcagcctcagtaacagtcagtcatggtcagaccttgagacgagaaagcttttagaaaccttatgaggaggaagagcaagaagaggaggaggaggaggaggaggaggaggaggaggaggaggaggaagatgaggaggaggagacaagccttcagagaattctcctcaacagagtgtgtcctgacttttacgggtttgatgaaactgcacttgcttccccggcctcctcgtcccccagaagggacgtgtgtgttcccagtccaggccctggttctttgtgtcatagtcaaactgcagagtctatagcctgatttcacagatgggcactacagcatctgcgatttaacaattataaaattaaaataaaacaaaataataggaataagacacattaattttccaaagtgtgtcagaaagacaaaacagtagatgagtgaaaaataaattaatcaaagcaagtacatgttttggttttctgtttgtgctttgatttttattaaatgtgttttgttcatattaaccactcaccccctaattcaccccagagctgctttccttccctattcacccaactttacatctttaaaaaagaaaaaccttcaagactaatttgtgctgcacaaatattcttggatgtggtcttctactggagaaggggtctgctaacttaaaggggtgacaatcttaaaagaaactgtctttctttctatcagcagctaataactgccaataattccatacctagggggaggttttgtgtgcccaactcctctttccatgctgggatttggtctcgctcaggctttgtagatgctgtcttaactactgtgagcgcatatgtgcaggtttcctgtggtgtccggaagataatgttttttgcagtcatccccagcctagtcatccatttcaatcacttcttccacaaggattccacagtctttcgaaagggctgtggggtgcgcattcccttcaaggctgagagagagctctacaatctctaatcttcctcaccctggccaggtgtaggccactgttcaatcaccatcttctgccaagagaaacttcttagatgtgagttaagagattcactaatctatggtgtagtagaattacctatggcttcttggtaatttcctgatatctgtgggcattccaaatgaaacacacacacacacacacacacacacacacacacacacacacacacacacacctagatatccaaagctaacatcaccagatgagagaaaacatgtggcatttatcttaaagagataatgtaagaactagcaaaagaaaagcattcacaactgaaggatatttgtgttcaagttataaaccctaaatccaggggggagtacaaaccaaagaaaatcacattattataaatgtttaggatatcaaagaaactcttaaatattttaagaaaaataataaaagagatgaatagagaagcaaaagacagaccattgcataccaaaaaactcaagaccagaacagtattacagttctcaaaaccagcactagaatgtagaaattgaaaaactgctttcaaaattctaaaacaaaatgactatgctgcctaaattttatgttattgatattctcaactggaattgagaatagaatagatacttatttaaatagaacaggactccaaaaatgctattacattagtttttatggacaatggaagttataattcagaaaaagtgaagtgacataaatataagtcatgaagatgttaccattaaagtaaaaaagattttggggttatttggctggtggatcttattttagctttgctggtttgaaacagctgttagtagcacctcttttattctcacaacaagattcaacgtttaaacgatagaaacccaatctcatattttatgacatttaagacttaaaatttctccatttttggttctgtgtgaaaaatgtaatgaaaccagtagatcaaattatatatgttctgcaacgtatcagaacagaaacacaattatcttgaggctatgaaataattatgttgtgataaacctctcattaataagtgcaattttcctggagtaaagacagtaactaaatgaaataagaacacatgaaactatgttttcagcactcaaactttatgttctatcactcacggaggtcaatagaaaatgtcagtcccaagattcccctcagaacagaagatttaaaagtatgcttgcactatgagcttaatcccaatagtgtacttaagttctttaatgttgttcttagctacctctgcagaagttaagattctcttctgaaaaaaaaaatatattgtaaatgtacacctttttttcaaaggtagtctgggaatggagagatatctcaatggtactgctcttacttaggacttgaggtcagttcccaggacccacctccagacttccacagacacctgcactctcatgcacattcccacagagacagacacacatatacagacaaaaaaaataaatctttaaaaaacagtaacctacacagagctttattagttcagagatttgatgcatacaacctccctaggctcaggacttagtgttttccattcaacaggagggatggttacatttatcagctccacagtatctggctgacagtgattcagtacatggttctgcctcttattagctatgaggtaaagaaacttacaaaaaaaaaaaagcccttctatgctacagtttttgttatatggctgtttctccagtacaggatataactaagcccttcctggaattatcctcataatattagtgggttagtttatttttctccaaaaattggaggaaacaacatatacagttaaaatgttactttcagttgtagcattatattcaacagaaattagcatagaaagaaagataatgtctccatccccctgtgccttgaattttcaatgacttccaatgacatgccttgctaaagctcagtcaccagctactgggaggtaagaaactagagagcggggctggtggagggaagtagagtccttgggagcatgtccttgaagagaactttaggacctttggccatgcatgcctctccatctgggtttctctgcttcctgactacttccaaagcaagcaactttcttctaccatgtgagctgtcatgctgtcctgccatgtcaaagtcccaaacaaccatgggctacaatccctgaatccatgagcccagataaatattttctcctcttcattggttgtctcaattgctacaacactagcaattttgactaactataaataatttttccaagacttcacaaggctgctagaagaatccttggatatgaacctatttttacctctgcaaaataatatagccactaagagactagaaaatgaaaggagaacaaaaagataccctggcaggcacaatacgattctagctggtactcattgtttggggggcctattgtaagaagttccgtgtccgtgttttataaccagatagtaggattatgctagcaagttcttttataaagatgaaacagtcactaaatgggtactcatcagcatctacagaatgcccaaccactcttgtcatttcctttaagatcttagagtttgctttctgttttatttatctttctggttttttccttttatttatttatttttttgttcgtgaaacaagagatgattaaagaattgaagttttctggtgaatgaaacagccagaccacttttcatgacaaagttggtaattagaaggccaatttaatggtgaatcaggcagaaatattcaaaccatgacaaatgactttaataatgcagcttgcaattcttgaactgaaataaatttcacttcctcaaactcttgccttttgctgcctgcctggaagatagaactgtccaggaggtattttgtaccctttattcagtaaagcttttactaggttttaagcgaccaaatagcttgcaaatgcaaaacatcactcaacttcttatgatttttttttcctgaaggtacaccgtgttctgaattctgagaagtcaggatttatttttcttctgttctgcttagccctgcaatcgtgttttattgttgccactttgacttgaagtattaaagggagctacattggcctcaaaattgaaagctaattttggtgtttgtcataagtttgttaagaccacatgcattccacagtttgaaaaatttcattattctgtccatgctggggcttcgtaattggatagtaaggatgttcaaagactaatttagtgaattgcacaatattttaaatggaattatgcaggtttatgggtccttaggggattcgactaggagcctctcgagaaaatctgtttatcagtaaatgatattagcagctttcacctagcttttgtcttcattaaattgctgctctcccaattgagggtcacatctgaggcctgctttgataatttgtcattattgtcttgtttattggagcataaagttgatacaggctgggctgcgctctttctacatgatgtgcaaagaagtttttattaacaattctaccaatgctaaatcaaggtggaattttccagggtttaagaaaaagaatcatttgtagccttctcatttcctccaaaattccctcagtagtttctgtatagccacctctgtacagataattttaagtgcaatcttatcagtaaaactaaagtggaaatttgaacatctgtctatagtattgacctaaaagataaagacaaatttaccctcccttaaacataacatgtccgtgtaattaccattaacactttatcttaaggccctttagattgtagttgggatatgaaaattatgacaaagcatattaattgttgcagcacagtcaagggtactttacatggcactcggatcctctacatagacagggagggattcccttaagagctgacacacagccctgctgaaagtaatattgaggttggctaagtctgctcctgactgctttttatattaatccacatggttcttcatctctcagggatgatgtgggatctaaaacatggaaacaggatagctacactatcctccatcaaacctgtagttcttgcacttttggggtaacctgcacattccgggactgctcttctccatagagactcatctgatggctatcgctttctcactgcatgtaagttggggttgtgctactcacttttaggttcagatgtgtcaccattttcattgctatcttccaagcctccaccctccattctcattccttattgcccctcgaggggaaaaaaatgtggactcttctcagagagacttggcccagggacagggaaacaagaatgtcagcagcagaggtagaccacgcttttgtagaccacaagatagaagaaatagagcaaggactctgtagtaccactaagggggattcaatttctcctttggagtttgccctggataacctgtttagccatccccaggatggaggttaggatgggcagaggtcacttgaggacctcactaggcaatgtgcataggtttggtcaagatgccagaaaagaaagtgccaatccttcaagtgtcacgacaaatagaaagtgttcattgcactctctgggggctcaggatgatggctaggcattccttatgaaagttctcaggccaggaactgagccaactcatttttatacactattacctagcacattcacagcgttcaaagatttatggttcttattgccatctacttacccacataatcaccagcctttcactttaaaatggttaaaaattgtttcatagattgcaggtcattaatgtaaattagactatttctatatttgatttcttaatttttaaaaggaaaagaatagctctcatacacacatactccctctccctttccacttgaaatttttaaatggccctctagacacctctttcaataattcttaccctccaaagctgggctgccttttaatttcactttaaaatagctacattgggaccataatatgattagaactaatgaatattgtggagagaagcaaaaaaaattttatttaaaatctttaaaaagtataaatacttcatgtgcataaggacctgtggtttatcgcagcccagtcaagagctcagcttggattctgggactaaatcatcagagcccatcaggcctcaccttccacgtctccacaaagaggtcacggctcctgaggcttctgtacagaacagtaggaagcaacgatacgaaaataaccttccatgccaataagagcaacagtaacaacagaaataatgaaaactgtcactgccctaagatgcataaaactacttgtattttgaaggccgcatctaatacagtcttccttctctttaccctggggggggggtctggacacaggaaatctgaccacaatggaatcagatagaaattgtacaaataattacagttggactttctttgggccatcatcacacaaataatgacatggagatttattattaattatgaaagcttggccttagcgcagggcttccttggctttcagaaaatttatttattcttcactggtttcttctttttaaactaatatatcaaatttattctcaactgtctggaattttctagtgaatcaagtttacttccctctatctgttactgacctgctactctgacacttatggtagttttaccagaaagagctggaggtaaagaatgtggcattctttaggaaattttctttggaattcactgtcaaccctaagacagttctacctttataaggcctttgtatatcacaactactctcccatccacttttttgctgtagacatcttactcttacatctttgacccagctccaagttcctaaactatgagaaaacagtgaatactatgctttccttctactacccatgcacccaccgtctcaagagcaattttaccacaaaacgttttaatccttgaattaagtattctgcatgaagaaaacaagagccttctgaaaatcatgggcttattgttacatcttgtagggttttgcagctatccctgtgacgacccctaacatggctattaccctagatgccaggaactgaaatgcaattttgattatgtaatgatgagcaagtgtgcttgcactagtccagtttcctctaccatggaatgacagagcactttttgcccttgtgttttccctgtggcaaagagcacctcagatgttcacagagaaaaggaaccagtatttgccccgttgctcacattggagggtgctttgtaacagatcagcggcggagggcagagttgcccatgacagcagtaggaagcaccaagtactgcaggatgccctagcctaaagagaagttctcaatcagctgatataagaggagcttccttcccgtttcgtctagtgtcagtgttcttattttctgcttagcagtgagcttacttaattctgcaatggaattttaacagctaggcacctctttggcagttctaccatttagtaagaacggatgaagacacaaaatgtgtctggctttcaacattagatattccgaaaaagcaatatataggtaaataaaatcctgaatttgttacaaaagtaggtttaaaagttctatttcttaacctataaaactgggaaagagatattctctttttttttttgcaagatgtacttctaattttcttgtatagaaatgtctcagggagacattcagaaccttagtataatccttttgttaaattcaatttttttaattttttgagactctcatatatttgtagtgtatttacatcatttccactcctctcccaacccctctcatttcctccactacctctcaattcatgacctcatcatactattgcatatatatatgaacatatatacatatatatactgtgtatacatgaatgtatatagtgtatatatataatacatatatataatagtgtattgtagtatatgtgtattgatatctgaatatataaatgtattatgtatattatatataatatgtattttatgttatatattttctgtgtatatatgtgtatatatattcacacagtctcctgagttcacttagtgttgctcatatgtcaaccatgtgatctaaacaaaaccatataatgatgacctgccagcatgggtagaaaaaattcacatctggatcatttccctgacagctgtgaactttgtagggacctctgtacacaccccaggctttgaggtataaaaatgcaagcaaatcaatgagaccaaatattattttcatgaccaatcaagtccctctagccaaaaagacttatctagtgaatgatttctaaacagccacatcttcaaggcaccatgtacccagcagtacaacaatgtaagagttccagtcctcattaccctgaagagaacacaacttttatattctgtgggactgaattttgtttcttttttcaaggctaccttgcttagagaaattggacaatttatcactcggtggcctggagcaaatttagtatatgcaagtgattagtttgtctcttccccaagcagcgttgatatgattggtaagagaggctgcaggaagggaaggtcgcttataacacacatcctctggggaactgctaatgagctattgacccttccccactgtaggctgatgtgtcatatcccattcgattctggctcctgagatgtaatttctaagtggtgatatttgaagtctatgtgagatgtgttagtctatcaagacttttttaaagcccagtgttattcacaccaagaatggcaggtgtcagttgatttaactggacataatttcaccatttccagctctcctccaaggtgaagagaaagtaggtcagttgtaataaatggacataatttcaccatttccagctctcctccaaggtgaagagaaagtacagtattgacaacattagttaaattagtaaccacatataaatcatatcttcatcctgtacttaactatttctatggctcccctcaccttgcccatttgcatggggtcagagaaaccaagtcaacattttttggcgtgtcacttgctatattatttaagacatactttatagctctcttgcctgccaccaaatggtttttagtgcactgctgtcaaaagctctgtgaaagataaaaagaccatttcagatgaaatgtgaggctcagtcagcaatccacagactgaagaggcctagagccaatcacccaaactgtcaaatcggccaatttgtctccttgcttaattttaagtggtaattgtttgtcccttgttaatttagtttatacttgtatactccaaaaagaaaaagtaaacttggtagacatttttaattaccttcaaatcaaggtaattaaattgcccaggtagatcattcccctaagaatagaggagaaaatgaagagcattctgggaggtttgagggagccagggcatcaatgaaatacgtctcttcagttcactgtatgctaataattatgaaattggctggggagggctctttgctgtataacagtgtataacagtgtaggttgtagggcgaagaaataccacaggaataagacgaagtcggtaaaggagagtccttacagtgcaaaaggtgtgccatcgcttcttattgcccacactagtacatgccacggagctcacaaaatgagtaaattctcctcacactcacaatgtgaacctcagagccagggaagaataacatacagacagcagggcaggaagtagaaaaccagccacaggcattgaaaatgaaacatctccttatcgtcacaacccaaaggccatggcagtaaacacagaagcggatatatgatacgtctttccccctttttaacatgaaatttatttcgaaacaatcagtttagaaattcaaggttttagtttttccaagacctactaaattaatgaaccagaccaatttatgatcttctatgtgttgctgaaagaaaaaaaaattctccctgcaggtaaactgtctatctggagccagagatattagaagcaatttcatgagcaggatcattaattatgacccatgaaattttaatagttgccttcttcagagctcttctaggagctgagatcaaagtggctgcaaagcaccgatcctaactcggttatcagggagtctggagagcttgggagggtttaggatctccatgtgtatctttatgccttgtgatggtgatgtgtggaagatatcatgtacacagcacaaatatacaaacacacatacctgggagccggtacctaggagctaggtacccaattcatttacccaattctgatgattatgtcacacctgctgatctttatataactatatggctaagggtgctacttttctttcttaattataatttagagaaggcatggtgtagttgaaagataaatcaatgtgaactgacctacatttatcccaggtctgtactataagagaagcatgccctggggcaacaaacttaagtggtctggaccttggagtcttattcatgtgaaatgctggtgtggtgtgagggctaattggaaaacagggctacacctttgctaacacactttcatatttaaagttctgtggagaaatatttccttaaaaatgaagatgttcatagtgcctaccccttaagattgttgtaaagacagaataggataatccttgcaaagaaaagtttctaggacatattacatgtatattcctctgtcattattcttgatatttctggtagtaaatagggtccaggggaatgaagggaagggcgggaaggaagtattactaaattcctgtctcaggattctgccaaaattcattgacagaacataagagagaaatcgaaaccatagaactgatatgaccagttcattatgtaaccagcaggttcatcaaaaaaccagcgaacagacttttgagataatacatgtgatcagaaatgatgtcactgtccatgctgctcccgagtctcctttggaaatggcacatcttctattgtgtattgtagacagaagtttctgtcctgccagtcctgaatccattcagtcccaaataaacacacagaggcttatattaattataaactgtgtagcccgttgctcaggattattactattaagctcttgcaacttaaattaacccataattcttatctatgtttagccatgtggcttggtacttttctcagtaaggaattctcatcttgcttcctctatgtctggctagcaattgctttctgcctttcctcttcccagagttctcgtagtctggtagccccgcctatacttcctgcctgactgctggccaatcagcattgtattaaaccaatatgagtgacaaatctttacagtgaacaagagcattaccccactatgtccagtgtacccaggacaatttttctgtttttgaactctgctagatgtctttaaatgtcatcacatgtctttttatgtctttgaacttctgtaagtttctgtcagaatcctctgtttcattaaaatcactcccattattttttattaactacgttttcattcactctgagaattcatactttcatccactgcaatttggtcatatccaccccccccacacacacacttcttcctgcaacactgcccacatccgtccacgcctccctatcctttctcaacttcgtcttttttaatattcatatcaattccttgagaatcctgtacaatgtgtctaatcattttcactctcccatccacttcccagtccacccttcccttcccttccaacttcagatcctattttttttttcacatcaagaccaatgtatactttccaaatacttgcgaaggtgtagtcttccattggagcatggttgattatcatactcttccagaaaactgacccttctcccagcagctgagaattgctaacatctcctccaattggagtagaccttcatgtccaagtcccctctccatgctgtggtttgtcatagcccagagcttctgtcgctattattccttggcctggctccattctccatagtttctcccacaggcaggtttcctgccttgcttctcgccacagctctggaagcagctagaataagactctgctcttaatccctgagctacttagattagtgtccatatctaggctaacaacttggctctgccggacagtaaacttatcgacacctgatgttacctccctggataagtttccaacctgggtctgcacatgtgacccctcagctactggccacgttcagggacaccataccagtatctttgggcctttggataagacctactccctgaaaccagtttccttactccaaactcctttcttaccctgtctatgctcttcttaccaccaagtgggatgtcacaacacagtatgctaaaggagagtttagaatctttcgccccttctccacatcatctaattcatcaccgccaagccttaggtttccgccctgtaatgctaacataacacttcaaattctcttttatctatttctcctctctgcaacttctcttgatggatgttaccacacctcattcaccacagattccttcctctactgatgcttttctatggccttcctccatcttcgtgttttggacatgaactccacagaaaatgggatattaaataaatgaaaaataataccattttctaatttcttggatgattggattaatggatatgcatgggtgtcatttcatagtgatgtaaattttggtgaaaaagcattgtctttgaattgcacaatctattgagtgactcgcactaaattatgtacataaaactgcttgtttatattcatgcaataaatattcagtgtgattgcacaacatccattcattactaattttagtttctaatttagtttctaattcttatttacacagcttttgtgataggcacattttctggaatttggacatactgaagaaaaagagaggagagagagagagagagagagagagagagagagagaggttgtgtcatgactttaatctcagaatttgggagccagaggcaagaagatcacagatttcagctatcctggtttacatataagatcctcccagctccagctaagtgaaaccaattctaaagagctaaggtgagtccatttctaaaggactcagtggcagaacactttcctggcatgcacaaggccttgtctttgatctacagaatcagcaagcaagggcatggggagacatgatttctctagtccaaccccatgtctgctttgacccccattctatctggtggcaaagtgctttattttctgaaatgcccacagttcattccttcaggatctagggaattatcattcaggctcatgggagagaaggcaagagagcaattttgtagttgaaactgacgttagacctgttgccaccctactggtacccaagttcttctcagcgtacagctatggtcagggcacctttgccccatgaacattgtttccttatttggattgacttatagaaataacattgtgctctacaagagattataaaacctgcagtcttaggtattgaatattggtacttctgtctacactggtactccatgttggcgtttttatcaccccactgctccacatttttgaagcaaactggttacaatctgagtcattatctccataacccaaggggcatggttgtggttttgtttggttcactagttggtaggttttcttttctttctctatagtgtatggaggtatagcaagggctggtagtgtgcatagaggagcatgcaagcatgtcattgcacgtgtatagattttgaggacaactttgtgaaattggttctctccttccatttccatgtgggtttcaggggatcaaactcaagtcatcaattttgtacaacaatgcctttacccaccaagccatatcaccagcacgtgatttgttatttcttttttcaaactaaaggaggaaaagatttctgttctactatttggataacggaagcttgaaggcccatttaccaatgcccaagctctatagctgaaaattctgctctgaagtcaatgctcactattaaaaaccacttcagtagtttataactcaccaactgttactgttcttgaaatgggcactgtgtccgctgcatttgctaccttcagtgagggaatggatctgaagccaaaatgttctacatatagtttgcattagaggttacaaaaggacaaatatttataaaccccatttatctatgtacttgacatatatgcactttacatacaaatttatcttaaacatgttcaaaacacacacccagagaggagggagagggggagggagggagagaatattgcgattaaaataatatcctgttcaacttgtcaaatccactttccttctttctggataagcaagttctaactgcattataaacactggactgcaccttttccaagttagaactattttcccttctagaatcttctagttcttgatttttttaagagggggaagatttactttcttgtggtcagaggattcagtgtgttgtggcagcaatggcagaacagtgccaggaagctgagaaaggaagctgccagggctctaattcctttggtttttttttaatgtgttctttgtcattttcaagaacagatatggtcattctggtcacactcatctccataacttttcttttttatttttacaaaattataattttacatgtcaatcccttctccctttcccccaacccttaaccacccccctcctccctctccccttcccccttcactccccatatagggtagggccctccacgggggatccccaaattccacaacatcatcctgggctgggcctgggccctcccccatgtgtccagggcaagagtgcatcccttcacgtgggatgggctcccaaagtcccttctcacaccagggaaaaatcctgatccactacgaggggcaccctagggtgcagaggcctcctcattgacatccatgttcaggggtctggatcagtccagtgatggcctccaagacagcagcctggggtccatgtgctcccccttgttcaggtcagctgtttctgtggattcacaagcctggtcctgacccccatgatcttcatttctccctctctgcaactgggttccagagttcagttcagtgtatatctgtgggtgtctgcctctgcttccatcagccactggatgagggctctagcatgccataaaaagtagtcatcaatctcattaaggggaagggcatttaggttatcctctccaccattgcctagattgtcagttggtgtcatccttatagatctctggaaatctctgtagtgccagatctctcctcggacctataatggctccctctgttatgatatctctcattctgctctcctctattcttcccccaactcaacctttctgctcctccatttcctcctctctcctcctcttctcctcctctcattctgacagctccctctcccctgccctcatgctccgaattagcttaggagatgctggcccttcccattctccagggaccatgcatttttctcttagtgtccttcttgcttcctagttcctttggtgaagaggattgtaggctggtaatcctttcttaaccacttttatcataccaatcacctcctctagcaagttcaaatcctgtaggatctttttgttctgtttgctgtgtaaagcactaagtttaatcaaggagagctatgcactggagcatagctaacgcaccagtggcaacatcactgaagacaatgacttccttggcccatagctccccgaactgggtgagacaccgtgatgcgctctgattcttgatttgaaatgttagtgctaaatcaccttccatttcattgttatttctttcccacaacttagagatttgattggtttatgttagctactttctgctctatggaatacatgttgcgtagtttcttacataggcatttgtgctgagctgggtgaataatagtatactctggagactactgaaatattctaaatgcaataattcaggtctttggactggagaggaaaatgattagacagtagggtccccctgcacaacccacacagcatcagtgctcagtctcctatggtaatggccattcttcatgttaataacttttttcccaataaaatttatgcaagctactctcatgttttctaaataatttttgacttcaaatagctactcaagacatgcaaaacaagatgaaataaataaaacgggcctatttggggcttggtagagatgaggtgttcaatatccatttgtgttttctacagaaaagcttaggtcttacatcttttttaattctacaattttgcattgagaaaaataggtcaaaatgttataactgaaaatattcttttcccttttctgcatgtgattttttgagttcttagtgcataactattctgtgtaagttggggaagatcactgtaaaagaaatcactgaacctcattttctagctttttgttctcttacctcctttgcaatggcactggttgccagtatcagctttcagggagttggagagaattggggaatgtaggaaatagataaaaccagaaagacttgagcggtcaagttgtcaaaattgactttaaaaatgctaacacagagccaggcagtggtggcacatgcctttaatcaatcccagcactgggaaggcagaggcaggcacatctctttgagtttggtgccagcctggtctgaaaaagcttttcaggacaggttccaaagctacacagagaaaccctgtctcaacaccccccaaaaaatgctaacacaacatgtaaaatgaagattatcactaaatcatttactaaacagccaaatgggcattatacttacttctactggaagacatttttgatactaaacaacttttcagtatgtgtcattggtgattcagagtccccagtgaatcccagaggctatttgaggcttatgaagtatatgtagacttgtcattgatacataaagtagtatttcttttacaattttcaactcaaaaatcacactttagaattgagaggtgatgaattgaatgattcccatttaatttaaactatccccagggaaaaattgactcacaaaatgcaatatattgttacgagtaactatagggaaaaatgtttgtatctgatgctacattgagactctaggtcgattggaattaactagagaaaaatcctcatatgttcagtatttattttcagccttatgtataattatgtgaaaatagggttaagattgtgaacccggtagtgttctattcatgataagcttggtgatcaaaagagttgcaacagtctatttgtccatataaaatgagaatttatctgtatcagaaacacgttgtaattttgaaagaatgatgaaatattttccaagtagttttcaactattctcaacttctcaactcaagatcgaggctgtagccgagttaactagcaggctagccttatacctaatctgtacagttatatttcagagatgagaagtcatcattgaattttgtattgtatttatgaaaacacagatgaaatagtcaacacaccataaatcacaatcctccctcttttataatatattagatgcccaactttcaaagcaacatatttgatgggatgggccctagaagttgttttcatcttaaaattctcaagattgagaaaaaaatttaaaagcttccaactcattaaaattaatttcaagtcacataaaaaacagtgctctgataagttcaaatatacctagaaatattataatccattgccccatctatcattattagcatgtatttcttctgtgtgagatttcattgtaagacatgcatactatggctttcctcattgaagatctgtgatacccacagtctcattcggggacatatattttttaaatgaaaaaccataaggtttgatagccaaggacactctgaacacagaacttttagaagaaagaagaaatgaaaactgactgactagctgaaccacatgatcacaatgttcctttcggataagctggaattgtttattctggggtattctcaaagaaacctaaacagaaattggttaggctatacctggccagtacagtatcaagaagctcctgcaaagaaacacatattggaaaagcccatttaaactttccacacactagtgggtctgatgggctctaaattagctcgcacttctcaccaagaaagacctaggcatcattatgaacagctcaattaagatgtctgtgcggtggggtagcaccaggccaaaaagcaaatagactgttcggatggattaataaaggaagagataatatggaaattgatgagtatgatcttgtgtcaatacatctttcctaaatttagacaaataaattgtttttttttccccatcctgaatgatttgattgttttccaaaacaagtctctgggcgtagcttccctgaaacccgggtgcagtaggcaggtggcttttaacagttgattcatcacgctcgctcgccacatctgctcagctgctggtgcctttgaatgggatctgttcaactgtttccttttgactcactccatcaggccttctgcctatctgtagaatgaaagtgggggagaggaaaatgtgagggcgcacagaagcctcgcctcccaggagcagcgtacttataaacctttcatggatttataatcctgtcctggagatgtgttcaaaaagctttcagatgcatcaaattttccccatttaataaaaaatatatttcccacagtaaaatataaaaaacgcatttcatttaagtcatgtgttggctctccaacagccctcgcctcacagcagagggaaaaggacacagtggtgtctgaggcagcgctatcaggactccctaagctacttcctatgagagaaaagttgcttccctttccaagacaaacctaaactgaattaagagaaagcaggtcagcattcaaacatgagctgaaccgagaggacaccaataaacatagtgaactgtatgtgggggaggggggaagcccacaagtcctcaacccaaagaactgcaggcaactgagcaaaactgggagtgggagaggtggccctccccagggaagagcaccagacggttcacatcagcaaaccatcagccctgaaaacatacatccaagtaacactgcatgaactcaatgggttatattttaggaatatacacgtatatgtatatttatgcaatagcaattaataaaaaaggagagccgaaaggggcacctgggaggattttgagggagtaaggggaagggagaaatgttctaattaaaatatcatcttggatttttaagtagttctcacaagggtcgcacatggttttgacagctgcacatactctctgtgtgtccgggtacactcttagttttgtgttgtctgttggtgatgacttcttccgacacagcagttaagaaatcactttctggaggacagaaaggttgagacaggggaagaatagaagataacaagaatggagataccattatagagggagacattttaggtttacagagaaatctggcactaaggaaatgtctggagatctgcaaagatgacaccagctaactatctcagcaacggaggagaggctgccttcaatgccctcccctgataaagagattgatcactgacttatatgccaccctagagccttcatccagcagctgatggaagtagaagcagacacccaaaactaatcaccgaactgaactagaatccagttgcagagaaggacgagtgatgagcaaaggggtccagaccaggctggtgaaacccacagaaacagctgacctgaacaagggggagctcttgctccccagactgatatctgggataccagcaaggaactgatccagaccccaggaacatgggtttcagtgaggaatccttggaaatctaccggacctcctatagtacttcagttcttatccctagcataggtgtggactttgggagcccattccacatagaggaatactccctgagccaagacacatgggggtaggcctcggccctatcccaaaggatacattagacactgatgaccccctatggaaggcctcaccatccaggggggggcagaaaggatatatgataggtagggttttagtttgggggggtggtaggggaggatgggagggggaagggaactgggattgtcatgtaaaacaatcttgtttctaattcaaataaaaaaagaaattattttctacagaaaatgttgaaagtaatgcattgcagttgcatcaactaaccctgttacacatttccccatcagtttatatgctgtgtttggaacactatgaattcagagcttcaagaaccccaaggaacttaaaacccaaaacaaaacaagccatggccagagaatcttagaaaagttacaggatctaacagattcctttgcactttttcggcatctgagaagagtttccgagctgttcaatcatggtttagtccattagaccagtcctattcaaattgtctcgtcctgactagcacagaatacagtgtctcatgccttttttagagatttgttattgcgtgactaccaaaagaattgttcagtattttgctaaagtccactctgtgatagatcagagattaaaaacaaataaatacagaacataccctccaccataggctccctggatgctgagattccaaggtacccaaggtcccccgaaagagctaattagcattgcagtcagggtctcctgcaccttgcttcagcctcagaagctccgggttagggagaaaacaaacaaacccatgtgaaatccaaacacaaccacatggggaactctgggattcgcctttctgtacttcaacacagtccaatgtttcaactgcctgtttctctccagcagtcatcatttcgtaagactgagaagagagcctgggagaacaaagggcaaaagcccaaatccaccagggggctgtcttccactcaagttggagataaaatgtttgaattctgtttggtgttcctgtttgatctggttttatttctgtttgctttttaacttgtagggttatctgtcacatttaactatcttcagtaaaacgttacgattgaaagactctgtaatatgacatatatgcatatctacatttgtgttagttatttaagatttacaaatactccatatgcacagaaagagaaagaaataataaactatcatagagatttgggaaacaaagaaagatacacatagctatttcacttcaaaagcggatacttggctgactattggcagatgtcaaacagttcacctttgctttttggatcagggcttgccaaaaatgtgaatgcagacttggtcttaagtgtggtcctccaagcactgtcaataaaggaaatgcaaaacagcattgatttcactgctgccaaagtgcccaggcttcgatctgtgaccatatcgaccccacccctagaacaaaatgtagcaaaatttacacaacaacatcaaatagcttcactcatacagactataatcatcaaagagaagttgatggtgcagattgtgtgaatccattacttctatttagaagactacacttcctgtaaaaataaataaataacactgggagaaaacagtacagatacactgacaatcagtttttctttttcttgggtaaaagtgtaaagcatatcctcctaccataggtacactgagattttgacagttcttggtggtggaaatagagaagggatgtgatgttgagctcaatgataattcctacattcatatttagtaatgcagaaatattcttaaatggttagttggaagctagtgaaaaatagcacacatgttgtgaattgtatatgaattggaaaagcaggcttaaggaatatgtagtccaaatttcaaagaacaccattttcttataggtagggttatcatttttctttctattctgttttcttactctatcatgtgtatggatttttggggtttttttaaggggaataaaattaaattctttgtaatgagagattctttgttagctggtcccacagctcttgggctccaaataaacacagagacgctatactggttatagtcctgttagccggtggtttgggcttcttatttggctagctttgtcttaattattagcccatttttgttaatccaagtatttccacgtggtattatcttactggagaagtgtccagacctctaactcctttggcactcacatggcgactgttccggcaggccctctctgcctatcttccccagaattctccttgtctctcagtcctgcctatcttcctgcctcattggccgaacagtgttttattcattaaccagtaggaaaaacatatatacagaaggacaaccgccatcaatacgttcatgtgtctctgggatggtggtatgatctacatgacctgctgtcaacatgacctgcctcaaaattgtgtcattatgtcataaataaaggaagctaaaaaaatcacgcacactttcctaccacttcaggttacagaacctccccatgtgccagaagaagcattaacagtattcattaatcaaatcactacaaaaacaggaaacaaaatctgggcttttaatccaagctactcaaaggctgagaaacaagaggatgataagatcaaggctaggctaggctacacagtgagctcaaggccagcctaggctacacggtgagctcaaggctagtcggagcaacttactcagtgacagacacaatgtcctaaaataaaaggtggaaagagggctagatacatagcccaatgtataaactcgagtaatttgcttggttaacatacatgagtgactatgttcagtccacagggagaataaaagtagaaaagcatgtgaatgtgcttagaattgcctcagaagtagatacagagaatgctctattgtgtgttttaagatttattttctttcacttgcacttatttgggtgtgattctgtatgtatataccacatgtgtatgatgctcacagaggccataagtggaaggcagatcccctggcaagttggatttacagttatgagccacctgacttgggtaatgggaactgaacttgggtcctctggaagagcagtaagttaactgttgagccaagtctgcagccctgaaaaccccaatttttagaatcaatgaaaatgtagtgtgcttgaaagcacatggttagtggctggagagcagagccacaggtttaggaactaggcagaccttgattagattccatgaccaatgcttagcagcaggattttttttatgcctctgagtccctgttgaaggtcaataacaacagaagcatggggtttttagaagggaagacagcgtctgtgttgagggtttcctatcctgtggggtgagacgtgagtctgcttgtgtgagcacaggtgtgcgtgtggaggcatgaaactgacgtggagagtcttcctcatttatctattgacaaagtggttatttttagcttgccccagtgagcccttgactccactaggattgcagagagtcactgtacctgcccagcttttacctggatcctgggaatctgtactttggtcctcactcttgaggagcaagcaactgcccactgagccatctctctagcctctgtgctgaaagaatcatatgacataatgacacacatgttaaatgctcaacaattagttggcataaaagtaaacataccacttaaaggacaaagaaaactataaagcagcatacaattaatgtgaaatggagggtggtggggtgggtaaaagaggttatgaagacagtgttgtgatcagagaacaatatatacatatctcaaatcagtgaaacccactaatacatacaattaatatgagctgccaattgtaattaaaatataatcactgttttagagtggcccttggctgttggctttcgcagtctcatcaggaccaaatgctatgctcttcccttggtcttcttccttcttggggccacatgagcatgtttgtccctgcaccacggtatctgcacacagaagggaagtcatcgctctccttttactagcatttcctttgggggaaattcaagacaacacactctgccttcatcaaaacaaaatgtcactgcatctagtgcacccagaggaaagaaataacacaatgtttgaatttttaaagcaagtatgttatcagtgttaatcaaagatggtaggatgatccacacaacactctgtgtaagaattactgaagaagtagaaaatcctccaaaaaacaggaaaaaatttaaatgtcactttacagagcttgcaagcatgttacagattttaatttagccaatttggccacaaatatttcttatgttgctttgttcagtaagattggctctgaaacaatctgaggtcagtgaaaggactctacttctatttttacattgcacaactttacaactaacaaaacatgcccaaacatttattaaataatcattcatcctaagtaatcctcaaaatacttcataaagtgcattttgtgaattcggggttcctttaggcaattttgagatatggtaatattgtgtaacctaatttctatcacctaatatttggaaccaggaaagcactaatccttttaagccaattgctcagctcagaatagccagtgaataaaggtagtggctacaggcaagattgcagtctcactatttgttcataggtgggaaggaaggagggtgggacctgcttcaattttcttatacttcaacttcacagagagaagccacctctgaccttacctaaccaaactacaaggtgttcactcctcccccaacaaaccatgtgtggcattcattatataaaataatatcttatgttaggtggaattgggatagtttattatactgctgtctctagaatgtgacctgcctgtaaaggtatatattaactagccatgcagagaacaatccactgtctctatactgaagcattataggttattatatcagtgctttgtagtaaaaggaaatctaacacagttgaattaattagagtttggttctcctgagcactgtgtatatgagtccagcttggcaaggaagtgacaaaaagaaaagcaagcattttggtatccacattccacattcagtggccttggctcattaatctagagatggttatcattgaatcatccgtcaattgtctccagactcttgctaaatgtcctttgtatctggatcattttccagaatctgatttgtcatttggccagaattctcacttcttttacatcatgacaggtaaagctgtttggaaatatattgtataactagtaatatccaacccgttttcttggggataagggggtggtgtctttcatcttgatccaagaagccttttagagcggaggctatctcctaaacatcaaaactgccgccttcatattttgcaccagcaaagattagttttatagtgaatcgactccatctatgtcagtaaagtagaaccagtgggcatctctccacttccttctatgtgagaactggtagatctgcttctaattctgcctgcgtgttatcatttgcaaggatgttgtattacaagaagatccatagtctgtaaggttaagatatctttatttagataaacaccagccaaacgcaagccagagcgtgccaggggcagcaaggcaggcaggccagagagaagggctcccatgtgccttacagccccttaaaaacatatcacaaatcatcctgacctcaccttgaccacgccctgacaggcgtggtcaggcacacctgtggccagcttctagcaggcgtgccttacactgtcccctacaatgttgaaatgatgaagagcagttattagaatgtacccactgccttccgaccatattgtcgactgagcctacagcatagtataaagaagactactgggctcagctataacttggtctgctacttattgaccactggtttcctaactgctttggagatatgctgtttaatccctttgaggaggttttgcttatccttattctataaatgagatggcaagtcatgaaggaaagccacatgccagccccaagcctcaacacagtcctctctactacacatggatgctctgttcacgacttcggtcaatgtcaggcccagacgctttcttcacactcagcctcaggttcaggaaatcaagagggaatgggtgatattgcctaaagactaagatattattaaatccccctttgttttggttccatgcttacctcattaaattatttcataaaattccaatttccttgtgtcatcaaataaataaaaattaacgtatcaaaaactcagcatgtgacctgtccaaagtgtagatatctttgttagtcccttccacagaggttttcttctgtctctatgttatccccaattccactggattttaaagatctacgtagcaacccccattaaatattcctctttaaagccatttaacaagtgtgtaattttaagaaaaactacttcccaacttagaaataatatacagatggagacttttctcataacattttggtaaaaactgtatctgggtgcagacatactttgtagccagaagcttgaaacactcaccaacttcttctaaaacacattatatacctgcaaatgaaaagactgagtaatagtattttaccctaaggagtgtaaacttggataaattctcaaggtacggcagtatagacacattataacacagctaagtgaacaagactaattgcaaaggctcaatactaaaatactgaacagcagctatagtaattctaagtattttatttctaataaaattcaataaattacctatttagagagataaaatcttacatgcagaaaagtctacgtgagaatgttcaacccactagaatttgaatattccctctttaggcaataaaaggcatagatgacctattttgttgtttatctgcatattctaggtatttacattaacatgggattccattatacacaaagtaaagggaatttgacattaaaagaaagattggttacgcaaagttgagtatgtggctctattgctctagaccgttgtgaaatacattgtttttctgtataagagacttctagcatgaggggtgtgcaaagggattttcctaaacagaagtcttttcgaggacataaaaggacctgcttagaggccctggcctgctgaaggttgggtgtgtccacacctacctccttgtgtttggaagctctgacaaagaaatttctatttacaactctgcagcagtgtggccagcttcctagtttgcaccctgtaatacacaacatattctttccttacctgcagacgctcagcagcaacccctctagactacaaaggaactgtaaaaggacaaacagtgtggccaggagtgtgctggtcactttagggagacttccccagttatgtgaaccagagtctacaggcaaactccatgtgagcacacatttgtgttctgctcagactgcacagactgcccaccttctctgtccaggcttcctatcttgtcttcaaaacccaatttaaatatctctttttcagcctcacagggcccacagggcagactcagaattaatttctttcttctgtgcacagccacagcactgttttcatgccgctaatccagagtgaatcataatgcatgatgatagatagcttgccggggcactcttccttgccccatcaggagagcaggagaagaagaatatgacaccaatatttattcagcctctagtgttcattaagcaccatctgtaattgatgcttttaacaacttgcattattctcaaatgcatgtactattgtcttcgcctcacaataaaggaagtgaacattcagcaaagttacacttggtcacaggagttgtgcaccaaaccgtttcctcccaaaatctttatgttgaacccccaatgtcgctatttagagatagggttcttgggagataattaggtttggaagatatcatgggggtgcaaatccttattatgaaattaatgtcctttattataaaaaaaagagagaaacttcttccccacccatgcaagacacattaagaaaacagttaactatgtactgcagttcacatataatactatcactttggaggaaagagggtcagaaattcatgctcgaccttggttacttagcaagtctgaggctagcttgacctatggaagatcagtctcaatattatagcagcaaccaatagttttctgattgaatttaaaacccactccacaagacataatgcttgtctagttctgttaagtgagtcaaaagctcatagctgactaggctctatgccataggagagaatgtagtaccattactctgttaggaggacatattgttaaactgccccataagttcttatctttatgaacatagattattgcattcttaactctaatcagaaagagcttcattttgcagtaggtggtgactaatacctacaattatgaatacacagagaataagactatagagtgctaagctctagatggtaatctatacctatacaacaaccgacaacccctggtaccatcaaggaagaaggggtggaaatacagtaagatcgccgggtgttggtggcacacgcttttaatcccagcactcgggaggcagaggcaggcagatctctgtgagttcgaggccagcctgctctccagaccgagtgccaggataggctacaaagctacacagagaaaccctgtcttgaaaaacagaaagaaagaaagaaagaaagaaagaaagaaagaaagaaagaaagaaagaaagaaagaaagaaagagagaaaggaaagaaatacaataagatccagaagcagcagacctctgcagtaaaacagtacttatttgctagacataacacagctgtcacacacatgaacccacagcagctgtccctgcacacacaaggcctgcataagaaagcagtcaaaatcccagcatggaccagagggtactcatgaagtaagttttccttagggatgtggctcctgggaggctacccaggctgcatttgatgacttacatccatgaacatattggtagcactaagtagattcagtgagtttaaaacaaaacaaacaaacaaaaaaccccaggaagttgggatgaaaagcagtggagaaataagggaggtttggaggggagggaatgagagggagatttgatcaaaatacattatattcatacatgaaattttcaaacaataaaatgttaataaggaaggagaagaaagagaagcaagaggaaaggaaagaaggggaaatgaaaaggggagaaaatgaaggggaaagggaggagaaaagggggaggagacggatgtctggatggtgtcatggatatttgtgctttctattttgcttaagcaaaaacatttggaaagttcaacatatactagccttttgagattagttggtggtgtaaacagactttgataatatagacaaaggagatacaggtcatacacaattaggctaaattaagcaatcagttttagaacagtaactatcataaattgtacttcagtaattgtgctcacagcctgtactggctggttttatgtgtcaacttggcacaagctagagtcatcagaaagataagatcctcaactgaggaaatacctccctaagatccagctataaggcattttcttaattagtgatgaattagagagggtccagcccttgatggatggtgccatacctggactggtggtcctgggttcttgttaggggccatagcaatagtaaccttggacctgtaagagaagtttgggaggttctgtaagaaagcaggctggacagctaaacactgagctgaactctggaatctagttgcagagagggaggagtgatgagcaaaggggtcaagaccaagctggagaaacccacagaaacagctgacctgaacaagggggagttcatgtaccccagactgatagctgggaaaccagcataggactgttccagaacccctaaatgaggatgtcagtttggaggtctggttaatctatggagcctctggtagtggaacagtatttattcctagtacacgaatggattttgggagcccattccacatagagggatactctctcagcctagacacacaggggagggtctaggccctgctccaattgatatgacagactttgaagatcccccatggaaggggattgatcccctggggagcagacaggggctaggacagggggccattgggggggcaggggaggagggaagggaaagggaactgggattgacatgtaaaacaagcgtgtttctaatttaaatttttaaaaaaggaaaaaaaagaaagcaggccgatcaagccatgaagagcaagtcagtaagcagcatcccaccatggcctctgcatctgctcctgcatgacttccttctatgatgaacagcaatattgccaaataaaccctttcctcctcaactgtgttttggtcatggtgtttcataacaataatagaaaccctaactaagacaaagcccaactggcatctcaatgagatgaccttcaaaaatatcatggttctatataccgaatcatcttctttacaaatacatttttatttatgtgtatgagcgttttgactgtacgcaacgtgtgtgtgccttatgcccacagaggccagaagagggcactgaattccctgaaaatggagttacaggtggtggtaaatgccctgtagttgctaaaaccaaacctgatctctctgcaagagcagcaagtgtgtttaactgctgaacctggtcttcagccctaaatagtgtgcttttgtgactgcaatggcaaacacaagtttcttaggactttgatcatgggttcaagcagggaagtgaagcacaggtattcatatatccttgatgcaaaaatagtctttctctactggaagggtgtaaatggaacttcctgaaaagaaggagacacctgtccagccatctatctagtcaacaatattgactagtgggggacagatagatggaccttacattcaacatgtttcttctattttcattatagcacagctttaaatttatatagaaatataaaaattgggagtatgcagactcaacgctctttcatcaaccaaaggcaaagcaaagatcaagtcaggatggtcctcagggtaaggagtgatgagaagagaacaggtcagttgggttctttagagctgtcaaacccagggattcaactctgtgtttataacagtcaaagtgagaagaggagatacaatctcaccctctgagcccacgaaatcctaccctgccttcaaaccccaatacaagcagtttccttcaactctcacatcctcttgtcatgtctctcaatcctgtctcctgagaagagttctcagtaccctcagcatgcacagtacttttttcagttgctggtatggaatgaatcagaatatgctgggactggcattgggtagcatttgatccctggctccctccatgctgagaagtgctaggaaattaccagaggcaacttcttgctagctttaacagctttaacagaggtagcaactagccctcggtatgcttgcaaactagaaattatcaaatatggttaattaaaaattaagatacccagaactcgtcttttattttgcatgtctctgtgtgtgtgtgtctgtgtgtgtctctgtctctgtctccatctctctctccctgtgtgtatgtgtgtgtgtaaaatcacaaagctgacacaatgtcttcctttatcactctccacttactttggcagagtctctcaagaacccagtgttctctaattcagcaagtgtagatagccagcttgtcctggtgtgatgttctgaaagaaaatggtccccatagggagtggcactattaggaagtgttggagtaggtacagccttgttggaagaaatgtgtcactgtgggtatgggctttgagatctcctatgctcaagctatgcccagtgatacagttcacttcctgttgcctgcagatcaagatgtgtaactctcaactttttctccagaccatgtctgcctgcatgtcgccatatcctgccatgatgatactgaactgaacctctgaaactgtaagccaccccagttaaatgttttcccttttttagagtttccctggtcatggtgtctcttcacagcaatagaaacgctaagacacctgggtacaccctgtctatgttcctgaaggctgggattataggcagtggcctaacctgcctgcctattttttttttcagtctgtttttgctttttgtttctttaagagttcagcatttaaaataaataaaatttgaaagcttcccatgcttgactataacatgcatcatgtttcttccctttttagagaaactgatatgctgtggtttgttttgcaattgcatcaaatcatgtttgaacagtgactttggttctgtcacgttacttccagttcctattatacataaacattataggagccagttttccaaatctccttgatgccatgcattagcgctagtctttaaagaagtgctctcaaagaacagttcaggatgagaatttcagtgggctatgagctctcctgtctccttcatagtttgcagtccgagagcagtccctagctcagactttaagacagatgttatcagagaaactgactgcctacgacagtggaaagagacaaatcaggcctcatctatgtactcttcatcctgctaaagtgtcacttccttttatgtgtgttcatcaaattctagctcccaaaataattgtgtttccctctagtaacatacacagctaactagctcaacctttttcttaattcttgaaatatgtcactgtacatgaatgtacttgaaatctactctactacccaacttgtttctaacgatgtaaatgaggggattttttaaaaaaaaatagataagaatcatatacagaagccattaaatagggacactgctgaaagattaaaggtaaatatatattatgagacacactaataaggtggtcagacactcttgaaattgagttgaaatgtaatatacagagatgaaaggaaattaaatatgaaaccctgcgatacttattaagccgtcagtgggaatctagatgatgatgtcacaaccagaagaggagagacaacccatgcaaagttggacgagatccagttcctgctgtagatttatgcagttaatttcgtcccttgactgcattcagatgagcgtttctccccgacatacaccaagaaaattgctgcattatagctgtgttaatggttatcagcatgctaatgagcgtcagaaggtcgttacagcgaagagaggttcaaagatgtataacctacaggaaacaagagcgtaattcttcagggactgtgagtgtcttgtttgtaggtcatagattatttgttttggtcactgcagtgcacagggactttaatttaagctgggaaaaaaatgaagccttttgaattgtgggagcagccctgcttaattaagcaaagtaataccagatagctttaaatttgtggttttaaaaaattatatataaaattccaggatagtattaaaggatgctttccagtgtggaattagtcttctgtggttaggcagaatgggaggtgcttatttgtttttattttttaaggcagaaagtgcttcatggctttctgtcaagaatggggtcaaagtatcagaggtgaaaagggggcaatatccagaaattaagtcacatcataggcaaataatctcagagtcttggcctttgggggggggggataaaaagatatttcattatttacttcaagtgtgtgtttggcttcgaaaggttaagtgtgtattgatactgagaacagaaggtattcaatcagaaatgctgtggttcttgtttatgaaaaggctctaggacacaaacgctgtgcagtccctagactaagctaggaagctctagaacgtcccccagaagcttcctctcaaacaaagatttgtacattttaatggtagaaaaaaatcttaatgctgctcggcttgattatgcagattttgtttgaatgtcctgtttggctagtatgctccttgggtgggctctataagctaagaagacaccttaggggtgagcagtgacaacctgcatttccctcgtctgttggcagtgggatttgccagtgtattttaactaaatattttcccatcccacaaagaataaataagatggctcctcacatacacctacacatgcagaacacacgcacacaaatgtgtaactcacagaagtgatgatagaaataacgaccttctgtgatggctgccctgacaattctcagggtgggggaggcctgaactttccttgtttatcagtcttcccagattaaccacctttctgtgtgaatcagaaacctttgttccatggtcacaagagtaagcagagagacatctagctcctaaagcttcctgcctgtacagaaaagcattcttgaactttaatctgtatgtaaaggctatcctctttcctcaggacagccatgacacacatttgctcacacagtctcccacctgtccctcaggaactattttcctggggaaaagtaagtttgtatgacaattaaaaaaaaaagccaaaaggggaatgagggaaggagggaagaaaggaaggaaggaaggaaggaagggagggagggagggaaggagggagggaggaagaaaatatagcaatgcaggaatataacgttaataagagttaataatttaccaatataacaatatagtgtcataaaaatataattaaaaagcaaatacttcttccacatagaaaatctcccacaatgctgtcaaaacagacactggtatttttgtttggaaactggcaaagtaagtaagaatcacaaccctttctatgtagctatgaacagacaacccatgccatagatgtcaccaagatgaagcaatcacggatcaagcaggtacacttgatggtcccctcagtcacaatgatccttctagtgtctgaagctcacactcctaaacatacctggtgcttggggtccctagctaagttagcaacatgccttcatctagaggaaacattagtgactatctctacagcagatgctcttacagcttgagaaatctcacctaaggtatccccccagcctcccacagaagctggaggggggcctggcactctttaggacagcattcaaagacatagatgacaagtccttgagaaaagagtcccaggtcatgaagctgccacaagacctgtctggtcttctaaaggactgaaaggaaagaaggagaataatcttgcccctcttttttagtaatgagaattaagcctctcggtgaaattttgtatttatcctcatttaacccaaaataactcccctgggctacataggtttgggagcaggaggtgcaattgcagcctttttgcttgaagaatcccgagctcgcaatgcacggtgaccctctgaggccctgagaatccagcttagcagctctgtagcttcagtatgcacaggaatcacctggggtcctcacaacatgcagattacaatttcaactctggggtggggccccccatctctagtcagctctcaatatacttagaagctgtacgtctaagccccaggtgaaggtgggggtgctgtcacaggccgcactcaaagctgcttctgtgcagtggattgtcccaggtctcagcagtagacatcccgaggtcactaggtgcctacccttgaattaatcccccaggcgcttttttatttttaatttgaggaaccccacaaatcaacaatactaaggaaagattctgtctcagaatagtataaagttagagccttaggagggtaagagggcacattaatccccaaggaggggggctgacaaccagggtttcatctctggggtcaacactgtagaaaaagaaaaaggaatcctgcacgttgtcttctgatctccacacattcgctgtggtacctgcacatctgtacacacatatgcacacacacacacacacacacacacacacacacacacgttgctcatgccccttaggtggagacacaatccatcttctgcattgttggcccattggccctgtttatgccatctagaactagagaacacaataaaaatggggagtgctaacatctccacaaaacctttagaacttccaggcaattttctgacctcagattttatcaacacaaccctttacatattcaaatccaactatctgtttgttaccactcatgttaggactcacctattttagaagaaactccctatagagctccagcctctctgtacttctatttccttccctgattaatatagtttctagtgcctgctatttaattgagcacaaatttaattaatggcaataaaggagttagtccttatctcagaaaaatgttgagtaaagacttcctgagcacaaacactttcatttgcttagcttatcggctacattagccataagtagggatttctgagcaggaattaaacaaaaagcatatccttatagggcatagtagcaatggtgtaaataagctgtgcacccagcaggcctgctggaaatatttacgtctagcagtcagctcttactacaagacctaagacattaatgaggaagaaacatttatgatagcctacaccttaggagtctattacaggtcacaagcaatgcttatatggaaggcagtacttagtctattctggatgctataacaaaacaaccataccctggataatgtatagacaacagaagtttactcttcactgttctggtccaagatcaaggtgccgttaggtttggggtctggtgagcccaacttcctggttcccagacagctgtcctttcattagaacctggatacaaagaaagagcaccagagtttttctttcacctttaaaaaacaaaactaataatgacactcattacatccctgaggcttgtcctgtgactgggtaacttccaaaatacttctcctatctgtagtttcaattttgaagctgggaatccagcatacaaacactgaggggacagagacattctgaccatagatatggtaacttatacttcatctcagctggtgcaactctcagaaaacaaatgcttcccttgcttctaccccaaatctagcttccaaatataaagaggaagagagtgtgggactgggggagaccagctctatctaataggctcctcttcaacctgccctgtctgtgctgccagtgactcacagcacgcaaactccaccttcgctgagaagtcctgagtctggaaatcttgcaggtagagaattttgagttattgccaggctttctggggaaatccgaagtacaatgttcactataagtttgtctcatgggtcattcagttctctgttttatggcctccaagatgggtccgtcatatagcaatgagaatgctacactgcaggaaaatagagaaagcttcaacagtagcaggtgggtctttgttctcagtgactccacttctgtcccttcaaagtgagggtctagagcatttgttctcaacctgagggtcatgaccccaggggttcccatatcagacagcctgcctatcacatatttacattacaattcataacagcagcaaaatcacagtgatgaagcagcaacaaaataattttataattttatgcttgggggtcaccacaacatgaggaactgtattaaaggtttatagcattgggaagggtcacggcgttagaaggtagaaagccgctcttctaaatctcaatgtcctggcagaattccaaatgggggcagtggcctatgggcactgagctctcactgttccccgacacccatcgccacttcctcacaccaaacccaggatgggaaaacagaatggcacacatgttcttctctcctcattcccttggaaccaaaggtgatgtcatctcctacatccttaaccagcctgaacctgctttacagacaactctcccccattggccctgcctcacagacagtagaggagtgaacaaaggggcacatgtaacatgccaggaagaaacctagacacatgtgaggcaggtaacactgaggatggtaaaactgagagagcgaagaaatattcctggataaggccatcgagctactaattaacccaggtgtagcggggactgactttgatttcagtgtaaatcgataaacttgcctctctgtcccagctgtttctatttggggtctttaagtctccaaacaaatgtgctatccttctgaaatattcctaatgtccagcaagacagatgaatagtctggtgaatctggccaagatgttaaaagaactattgatgttaatactcttgggatgacaagtacaaaagcccccagttaccttcttctccatgtcctttctcatagcaatttgggataactgcttagcctgcctccatgccagctggtacctcctcccctgccaattatcgggtcttgtactaaagcaaaaactacatgtgattcgttactgaaaacttgttaactcaacctacttttcatggttgacaaagttcataacctggtcttcctgtttcttcagcttctgcccatctttgactgacatcctgtgtctcagtcagccctggttgagagtcccaggattcactgtgtcattcttacctttgagcttttctggtccttccttgggaacaatttcccaacactaaagtgtaacaaacactcattcttcattctttacctgatgaactcactttaccagaaaatatctcccacatgtatctttattttatttcattcatgtctgcatacgtgcacatagatacgcacaagttcccatgtagactagacaggcatgggatgcctgggcactggagttaaaggcatttgtgagctgccagataagggttctgggatccaaaccccaggcctctgatagagtagcaagcagtctcaaccactgtactgagccgtctttccatctctagaagtatacattaagaatgagcttctgaaagcttctgtttcagctcctgctagatgctggggtggtatgaggatcccatgaacatgcaggagggttaaaagttattaaacagagagttgatttcatgtcacatcatagcacagtcatggaagactcctacccgcatcagaaaacagtcataggaattgtcatcataagaagccacttagcctgaccggtccagttcctgtgggaaagggagacaaattcagccttctccacctacttacttcccagggcaggtgtgagagtggcttcaggaagcctggcctggtgaggcctgactaaaacaccaatacagaggctaagtcagaaggactcaaagtgagttccaagccagtctgagctatgtggtaggaccttgtctcacaagaaaaagcagggaaaaatgaagggagagaggggggtagggaagtggataaatcagagcacacgggtgtttctaggggcttgctaatttcaccatcaaatttcctctccaaactccttagcatcggcttgaccttcagaagtatgcccgtgttacaggcctcacatgagcatagtgcatgcatgcacacgtgttcaagcatgtccacatatgtgtggatgcctgacatgtctgtctactctccatactgtacttcaaatcctaagaattcaagttacttattatattcctagcaggagcaaaataaaagcattttctctaatggcaatcaggcagagaggagtaaaattagcttcaaatgagcatgaaagagcataatggttcagattgcaggaaaacagtacatcccgcagccttttccttccttctcattctttgtggtgaagcagagaatcatgcccttaggttttccacacaatatgtgtagatgggagcagaaaggagcagcaggggtgtggatgcaaagacggtgcaattaaaaggacaaaggatgatttgtttgtctttaacacgctgcatcttcccttcaaagtcaccacgaagccaccgtcgtcacgtaatgtaattccaaaaaaaatattattttaggcaaaagaaaattctatagacggacacatattggatgaagtattgcttgtggtgtaattttaattctgaaagatcttgctaagagggcttatttaaataggctttccctgagatgaatatttaggagaaaaattcctacaggatgatttatagcaaaattatatgaacagaatgaaggacagaagaattttattagaaaagggtctcatttccacaaaatataaattataccttttagaaaatatattgaattttattaatattctgtagacagcctgaagtgttaatctccacccctacctataagagtttcattatgatgtacaaggtgtatttaccctttaaccaaatcattttttgagcaactcagtggagtctccagtttacataccctacaaaatatttttattgcatttacaaaatgtatatttttgtattgttggcaacttgtaatggtctatgtgtgggagctatctttttatataaatattcatgcttttgtcattaccatgccagcacacatattaaagatgaacttctgtctttgatagccaaagaagaatatttgttcaataactcctgtcaatgttattatcatattaacttccttttaatagggatacaatttgggctttttaatgctgttattaaaaattttccttttatcatgttaaagtttatagtcagaagaattacttggagtatacaagtgatcaccatatttattcctggcatttgaaaatgacctcatttagaccttcgtagctaatatttttgatgaggaaattgacttattgtgatgtaaaggacttggccataaatccctttccagtctctatcagtcttgaaaattgagctccttaggttgatgactttgttgtaaggaattataggctaactttcatagatgaagtgcaggcttcagcaaggacaagttcaagtttagactccacaccatttgcagtttggctccttccacagaaattccactttggctttgtttgtttatgtatttatttatcatcaccatattccaaaagttatttgagatgactcagaagctagctacccatgttgtcgagttttagcatgtgtcggtcagagctcatattggaataagaccacaggacagtttaaccggaggtcatgcatgccgacatctcctggagacccatcactacttcatgctccaaggtctggacaaagcaggaatggtggttaatgcctataatcccagcactcagaaaacagaggataaagaatttaaggtgagtctgagctacatagagaggctgagtctcaaacaaaacaaatcaaaacagatttgtccaaaataaaatggacctgtgaagtcacaggttactaatataatggagtttcttacccaaataatcaaaactgcctcccttaggttgcatacatctccttagaagtgacccaaatgatagagctgtgattattcattcctaatgttaactcttgtgagttacccagctaactcagcatccttgagtaactttgaacctccactgtgaccccttccattgaaactctttctctgcctggttaagattgcattgcttaccttcattacggcaagctactgttgtgaaaatatgtaataacaaaggaaaagaagaaaacagaaactattctctttggcagcatttggggacttgaaaattaaaacctccccattcttcctgctatacgacgacctcaaagcagcacatccctggcatcctctcagatggccccaactgtaccctccctttctttgatttatccctctgctggccctgcaggagagcatcattttcccgcctgccctctgtcctctatatttcattccaggtgtctatcgaggcaacagaagataaagctctctgctttcccttgtacaaaagttctagatggaatcagttcacctgtctgtcactcctcattaaattcttaccctcttcattcacatcctgatctttgcaaatgaacatttgcttaataaatgttcccaagactaacagtgccgagtgaaaatcccacacagcagtaaattattaactcagtcacagagggagtgccatatatgacttttcagaatgagttattatgtggatcatcgtgtaattatgaatttttcaagccatgatagaggaaaattgaatatttaatattttatggacatattctacactgaggacatctttcaaaattttatgataatttttagagtgagcgaagagcagaacaaaagttacaaaataattgcaaacttgaatatttaatcactagggacattgttggttatttctcaaattatataacgtaaccaaggctgtgaacttttaatcatagtgaattcaagtgggggaaaagtacattaaaaccaagtgacaaatatgttttaagttgtttaagaaatcagaatacaggggttagggttgtcaaattcaggtcttagagtataaatactccatttctgtgagaggtaatctttagtgttttgttctaagtgagctattgttgaagcaaacaagtttgttaaataaacacttttaaaatgttcaaaaccaatactaagatacaaactccaaaatcattgaaacgctttgtaagtaaataaaactggcatctgcaaaagaaaagccgattttcagctttgatttaaaacaaaggaaaaagttaagcagcgcatgtgcaatagtgcacagcagcctcagcttctgaattctgagtagggtctgggactcctgtgtcccctactgccgactcctgcaccccgtcatgatgtgacacttggctcctcactttttaacttgaaaaactggaacgtttgctgatttcaattttctcctgtaggttttcctggttgctgaagagatccatttcttgggtgctactgcaggaagctttgtggggtatttaaaagccgagggcctcagccctgagctaaataaataacacatgtattctgctcaccccggtcccagattccaaactgattagtgaaatgatgctgggcatagactttttttttaagctcaggacatttccattttcatccagggtttaaaatcactacaacctacaattcttcctgcagaattacccattctggtgaaatgaattgactggacagtatccctgagtcatggactctcaagaaaccatttacggtcaacaacggcttttcctcttttgtgtctacaaaagtccatggctagtaattttctaactgttatggcttagaacgggcttcttaaaaatctagctcccactcagatattctagagaagccatgcttttgcaggcctatgtttttattctgtttgcagactctgccagaattcctggttctcacatgtcagttacctcagaaagattttcagaaatgtctatgaccaacaagtccatggggaatatacgtgggcagattcctcacactgctgagggcagccacatgtcttaggagctccggttgaggggacatgcaaagtgtaccaagggacactgagaaggacgcactagcagagctctgtgagacaggtggaatttccctggagcacagaggcaagggagagcctttaccacagagctgatggcaaatccagtcgtggaagcagagcgcgaaatgtgtgtctggcccactttagtaatagtcaggaatccagacagtgggtctcccatcctctttgacttacagaactatgaaagaacagtgcaccagacattctcttcaagtggccaagaaggctagtcaagactcttgcaacagaagaaatattaaactccattcacctgaatctaaaggcatgggattttattttcttatttgttttaaccttgacctgagtgaatggcaacttggagttcccagttagtgaagtttgtcaaggagttgtttacattactttgccaaattaggctcctcccttcccaaagaggatagggcaggggagacaggggagctgagtccttccttgattacacttcaaagtgatagctctgaagttgctaacattttcaagtgggagaaaatttgcatctcaaaagagcaaagaatgaatttacaattgtcctttctctaaagtaaaagtctccccccaaaaagtgatgcagagattgaagccagagggacagtttgaaaccgttatgctcactgccacagcccatactgacccaactgtttttagattattcgctagtctgcttatacctaagatccttctggcaatgcaataaaacaaaagtgctattagctgatgtggtatttggcagcctcccaccctcttgatgagaatggtcatttactattgcctcagcaaacgtgagctagaaaatgtaaattgcctacaatggcctccctctccttcctgtccaagttgtgtctattcacccctttattcagcaaatgccaggccttgtgctgggcaagagagtatgcttactccaatcaaagtacatacgcttagtgcattatgcttactaaatacacaaactctaggtatcataggtggttatgatattatcttagcttggttccttttgctgtgataaatatcacaaccacaagcaacttggagacaaaaaggtttatctccacatacactttataatccatcactgaaggaagtcagggggcagaaaccttaagcagagaccagggaggaatactgcctactggcttgctctccacggctggggggggcaccttttttttttaaaacagggctacagactgtgggctggaatctcccacatcaattgttaatgaagaaaatgatccatggacttgcctgtaggataactaatggaggcagttgatgaccctacagaagggagacatggtactaaggaatgtagatcagcaagagattatcaaggtaatagtttgcctttggaaaatgccttgaggggccactcaaaagcccctaggccgaattcaactcagtcttttcttgtcactgtagaagctactttccagagcgattaaagaacctaatacttattggaaaaaacacactgatctggatgacagaacagctttaggagacaaaaacaaaaatatcaggtgaaactgtaaatcaaaactgataaaggaacctccccaaagttagggctggggaaaggttttggttttttttcttttcaggaaattaaaaagaagcatcttgaagaatttaaagacctttggacaaataagcatccaaagaagaagtgacaattacccaaaaaaaaaaaaaaaaaattaccaagaaaccatctgacctccaaaaacaagattgaatctaaactgggtggaggtcatatatgtctttaatcacaccacttgggaagcagagtcaagcagatcccagtgagtttgaggccagccttgtctacaaaatgaatttcagggcagacagggctgttaacatggagaaaccctgtcttgaaaaacaaaatggaataaaagaaaaggaaaggaaagaaaaaaaaaagaaattggaaccccacatcaatttcaccagaactataacaacaaaattaagctgaacaactccaactaaagatcagctctggactacaaactgctgctctgaacagttttgaggtgaccgactgagacgatccagcctcacagactactctagccaggacttgagacaagccctgcactttccccttatgcagagcctggacaaaaatgatacagcttgacagttaacctaaaatttttcttttcaggatcccgtaaagatgctgtcacccccagacagcaggaagtaactttaagaacatgatgccaacattcccaagacatggggtgggtggttttttggtcactcattaggttatggatatttgtcattgtttaggggtattagtttacaaaatgttgatggttactgtcaggaagaaagttaaacaaaggggattagattcaaggttcttgttttggaaaaaaaagggaagacagatataggataaaaggaatcttattgaatcttctttttaaaagcaactactagttttaaatattttacattggattggacttttgtatattgtttataaatattgtgtagtgatacaaatttgagattaattttgtcaaaacatactgtatatacatttctaatcttgttcaagatattgtaccaaaaagctcatttaacaatgcaatacaaatttctagtctttgaaagttattattaccaactatataaagtaatgaggaactgtaggttagtaactagtcaactattacaatcaaacttgtaatcatattaggtatgttttcaaagtcaaacagagatatattttaggtagacaagtcatcttcaaacacttaagagatctacagaatatgacatttaaaatgttttaataacataggtcaatgtttttgacaatgagacatgtctgctcctggcagcatcaatctacttcagagaagataatggtcattgaagaaactcacatggaatttattttctttgtggaaaatgtaagcccctggacaagaaaatgaccttgtcttgattgatgacagtatgctgtccaaattggacaaacaggacacaaaaaaagagtgactgcagaccgtgccaagacaaggcggggcagtcattcaaaaatcctgcttcacaaataagtctgtcagatatgctaggtctacaagccaaagatagatgccctaatgttgtagaggaaccttgggtgactatctaggcagccagctgtttttatcatttctcacaatatttggaagttgcttgttcacgatttctgcttactcagttaatattatttccttctcgagtctctgagggagttgaagactagatagtatggttacagtttttattgcttgccagactcagaaaagaaattcactaaagatatgtagagtatataaggttgagagacataaaaagataatttgacaatgcaaattaaaatagaaagtaaattaagtacaagactttggactcaccaagaaaggttatatataaagtatatttctgaatttgtcaaatgcaaatgggttagatactttctctgaatttgtcaaatgatgaacttgtcacctgtatatattgtatatacttattatacttattgtatatagttttcttatattagatgtaattttcctttttgtattagacaaaaaaggggaattgtggtgatatattgtttatgatttattaaaggcactggagatcaaaatagcaaagtagccatacttgtcagtcaaagaagccaagcacacacatttaaccccagtactcaggagacaaaggcagatggatctctctgagatcaaggccatctggagctacaggagattgaattagtctaaaagagtaacagagtttgtgcctttaatcccagcactagagagatataaaagagacttttatagtcttcagtagtcagtctcaggattattcttcagccatgatgaggagaagttacagtctgaggatggtgagagctcgttgagacaggatcagcccttacagcctgagttggaactaagagctagtaggccggctgctttgctattttgatctccagtggatttattaaatcatacacaatatactaccatatcctactttctgtcaagttacaaaaactaaccagcatggatatggctagaaaaactataagtgtttggtaaatgtttgtaataagtcctgtggaagttctttctgtcgtttacattattatcagtgtttcttatcattctatctgtgcccattattgtcctgcaggttcaatgtatctttattatcaaatggctgctctgcacatgaggaggctaagtaccagggcagggaaataatcttccaaggtcacgtgactattaacaggagattgggattctgacctacatctgtgtgactctagggtgatagtgatagcaagttggacaatacatagaacatcacagatgtctgtagatcatcacaaatgtagaccatcacagatgtccatagaccatcacagatgtagaccatcacagatgtccaaagactatcacaggtgtctgtagagcatcatagatgtccataacccatgacacagcatatgaattcagaatctgtgttggtggtaaccctcaagacaacagcagtacaccaagcattttcagcacctagcagggcatacagacatcttattgaaacaaagaatgctggacacctggagcagagtcaagcacctaatgaagtctttctgtcctgtgtctccaaatacagaccatattcacaagctttgctatactcttatagcacttgacctatataatttgttcaaatatttataacgaacacccactatacatcaccacagagaatggaaggaagaaagccaaaatcagccactgctattaactgaaataagggtaacaccatcacagtgtaaatatgtatatctgtgttacctacattcgccttaaatacctcactcgtctttggtttccccttccctgtcctactctagacttcattccaattttttccagatgcagctgtttctctgtgaagatgttctacatcttggctgttctgcactttcattctaccaggcactccactaaacccatcagtgagtggtctgggtaccctgactcagggcaactcactgaacagcctgatacaatgacttttcaagaaggtgttcatagatcaatggctatcagtcactagaaaagagcagtgagccaagaactggataagggcttgcatggaacatcttgtcaaccctcacaatgttctgatgaagaagacactagtcctatttgaaggcagatgctcaagaatctacctacgacatcacagttaacaattttcaggtgtgtatacctccaaagtctgtaaatcctagagcggttatttcctatagcacaatgactgggggccaatgttttcagctacgctgtatctcatagcagactgccctcccatctcatcctcccccactcttagtaaccatccagagttcagctgccactagccttcatagatatccttctaacagaaatcaaaagcaaaaacacaagaaatctctctttctccctgtctgcatttctattgccaactaccccaaccatcacaactttctgatgggtggcttcccactgcctacagaacatagaacaaagcttacacttctcatagtagtcagcgctcttcacaatctggctgcaaccccactctcctgcattcttcctccccgtctcactgcctctctgtacaccacctagctcccagcaggacaggcttccttgctctggaacagcagccaataacaagggcatgaaaggggagcagatcaaccttcaaattccaaaagctggcaggttggttggtaatcggtgcctcctctgtaatctcaaaagtgggaaacaaattttgttcctctattctaagggttgaactagttatcacaaccagagcacaacacagtgcccagtgcttggcactgcaggcagaacctggtgggcattcaggtcctgctgctgccagccctgtgctcaggctgctaattgaaaatacctcctctgcccagggaagagcctgttctttcagctgtcacctcttagagggagtctatctgagtgtcttccgtaaactcccatctctccttcccctcacttcgtcagcactcagctttggcctctattgtaacactttaaggtagatttcaatgtctagcttaaattcttaatttcaatctctgttacttgcttctctcttaaattaaaccacgagtctgctagagcccttccctatgtctactaaacacaagactttgtacctagtgagtttgcaaatgcttgttgactaacttaatgtttttctctgtttactagattattactagtgctccaacaatattttagtgtgaaagcagggccaatggcgagtggaggaggagatttctttcctaaattccaaagcacatccattttccatgcaaaagtcattttggctccagaatctttgtctgcaaattgtattggtcttcctttagaagcatgagggaatttttatgacaggaaaagctaatgcttacaaaaccttttcattgtaaacgttgattatttatgaactcttacaggaaggagaccctctggacgctggcacatgggagaagccatcccccccccaatttataatgaatgaatgttggagtaaatctcttcattagccagatagagaaaggaacttaccctccaaagtaatcactcatctcttcaaccacaaatgcccccatagactccactctctggtttctctcatgggacagacctctttctgacctgctgagtgcaaagattctggtggcaggtagactccccaaagctagcttctgggagcaaatgcggccacagttctggaaacccatgggtggtcttggctggcaaaatgcagtcctttaagcaactgagtcaggagcccattaaaggtgttaattttacatgatgtggcacaacaagcctataaataaataaacaatgatcccccccagttcctcccgctgcatttcttgtacctgctgcagcctcagccacagcgggaagctcctgacatataccaggattgccctaaaaaacacaaaaaggaaggaaggaggcatttctgtcaccaagataaccaagctacaaggacctctgatgtcttcagcaccggattcagccacctttaggaaattcccatcaacctgccttctgtggctggatatgttcaatttaagatcatcattctgaactgcaagaacaaaacacagatgttaggattttagaaaaatgtactgttgagggccattagaaaaaaatactgtttaaaatatataacatatgtaactattaaatacataaaaatctcatgtaccaagaggcaaaacatgatggaagttgctgaatattttaagtacctatattgctgcgtaaaatggttttgtgccatagaattttctattgcagcagatttatgaaactttgtcaacatggtagatcatgctgaagtcaggggaaatactagcgcactttaggttgctttctatttttaattaagtttgaggctgcatctttgctcttgtgagtgtgcatgtaaataaatacatgtaagcgctggtgtgattaacacccatgcagatctgtgcaaatgcccggatgtacttgtaaactgacccctccaactgcacagattacttgtggggtgggtctgtttaatggttatacttggtcgaataacaaaactccacttgcttggtcagccccactcattctgggaagaaagccccagcaagtccttcctgggttctcgctcaccaacgtaaatcaggtagactaaggtttttgagactagccatgtttacccatgtacttaaagatggaagcagattgagttttcgtaactaactaaaatccacctgatgctaattctagggtcttgctcaaaaacactcttgagaattaaattattcaggatacaaaatactaagcaaacataaactaatcaaaacaaaaacaactgataaccaacagctcagatacacataactgagggcctaaggtgaagaaagaaagagaaaccaagaaccgagaattcccaaaggacacaactcaaattctttctgtccataagctgccctgctgcctacctccatgcttcagtataaactcccaaccttgcatacttgcacacatagtaacacatactatgtaatttggcatggaattgtgtacttttctatcttgggcagatgctttctgtgtttgcttccatccaaacataaccggaccactctggaggtcatcaactccatctcacacatctgtgtttctctggggtctagtagagagtgagacacattagaagttctgtggatgagcagttggtgagttgttgggggttctctagcaatccccctcggcatttcctcatcccactgcatttgcaccgtcagctgaggatgcaaatactcatacctgaggagtaggtttctatttactatttaccttattctttacccttttaacacaaaattacatgtatgtctaatactaacataaaattccactgtgaagtcctgtcacaatgtatttggttccttccctattggtgaaggaatatgctaaccatttcctagaatgccataatggtattacacacaataaacatctatgtgtacttttgttctagtgtctctatttcttcagactctaggagtgggacagaggtaatggtcattttgaattttttcacattattagtgatattaacaatttagtttcctgaaatgtttcaaagtcaggcacacacaatattgagtgtttttttttttcaccacacacttgacagtacttgctaccttcaatatttttacaatttagcctcataaatgaaagggctaggttaaaaaagaaagaaaataggaaggaagaaaataaaggagttatcttgttttgttttcagttcctctgactgctagtaaaattaactgttttcattattcatcagtacatgttcttttaaaaactgagttttcttttgactttttatctttaatgtaaaggcaatcatagtactttagggatgtctttcacttgtaaatgacatacatatcattgctccagataaatcttacaccttgtaaacttcatgaggacaatcactgcatcttagagtttgtcttacaagcccaggcttagcatattttttgtaattttttttagttcatattaggaacaagcttgtttaacatgccaatcccttctccctctcccccccacccccaacctcacacccaggagacatgggatgggctgtcaaagtcccttcttacatcagggaaaagtaccaaaccactaccagggaccccctagagtgcagaggcctcctcattgacatccatgttcaggggtctggatcagtcctgtgctggcctcccagacagcagtctggggttgatctgctcacccttgttcaggtcatctgtttctgtgggtttcaccagcctgctatcgacccctttgatcttcattcctccctctgcaactaggttccagagttcagttcagtgcatatctgtgggtgtctgcctctcttctatcagctctagggtggaataaaaagtcatcatcagtctcatcataggggaaggacatttaggcgatcctttccaccattgcctaaattgtcagtttttgtcatccttgtagatctccggaaatctccctagtgccagatctctcctcgaacctataatggttccctctgagatggtatctctcatcctgctctcctctttccccaaatcaacatttctgctacatttcctcctctcccctcctcttctcctcctctcattctggcagctccctctcccctactctcatgctcccaatttgctcaggagatcctgccccttcccattctcaggggtccatgcatttttccctaaaattcctggttgtttcctagtttctttggtgaagaggataataggctggtaatcctttgctctattctaaaattcatatatgagtgagtacataccatgtttgtctttttgtgactgggttacaaacatcactcaggatgttttcttctagttccatccatttgcccacaaatttcaagattccatttttttttctgctgagtagtactccattgtataaatgtaccacattttctctattctttcttcagttgagagtcatctaggttgcttccaggttgtggctattacaaacaatgctgctatgaacatggttgaacatatgtccttgttgtatgaacttgcattatttgggtatatacccaagagaggaattggagaatcttgaggtagactgattcccttttttctgagcaaccgccatactggtttccaaagtagtcttccaagtttgcactcccaccagcaatggaggagtgttcctttttctccacatcctctccagcatagattgtcattggtgtttttgattttaaccattctggacagtgtaagatggtatctcagagttgttttgagttgcatttctctgatggccaaggattttgagcactttcttaagtgtctttcagccatttcagattcctctgttgagaattctctatttagttctgcaacccactttttaatttcattgtttggtgtttcggtggctagcttcttgagttccttgtatattttggacatcagtcctctgtcggatgtggtgttggtgaagattttttcccattctgtgggctggcattttgtcttgctgactgtgtcctttgcttacagtagcttctcagtttcaggaggtcccatttattaattatagatctcaatgtctgtgctacgggtgtaacgttcaggaagcagtctcttgtgccaattcgttcaaggttatctcccactttctcttctagaagattcagtgtggctggatttatggtgagatatttgatccatttgcacttaagttttgtgcatggtgacaggtatgtagattacttttggcaagattgccatttttactatgttgattctgcctatccaagagcatgggagatctttccattttctggtatgttctttaacttctttctttaaagactcaaagttcttactgtacaggtctttcactttttggttagtgttaccccaagatattttatgttgcttgtggatattgtgaagggtgatgtttctctgatttctttctcattgcatttatcatctatctgtatatagtagggctactgattttttttgagttaattttgtatcctgctgctttgctgaaggtgtttattagctgtaggagttccctggtagagtttttcaggtcacttatgtagatgatcatattacctgaaaatagtgaaagtttgacttcttcctttccaatttgtattcctttgatctccttttcttgtcttattgctctagctagaacttcaaatataatattgaagagatatggagagagtggacagcttgtcatgttcctgattttagaggaatcactttgagtttctctccatttagtttgatgttggctgttggtttggtgtatattgcttttatcatatttaggtatgttcctgttattcctgttctgtccaagatctttatcatgatgggatgttggattttgtcaaaggatttttcagcatctagtgagatgatcatgtggtttttcttttgcagtttgtttatatggtggattacattgatggatttttgtctgttgaaccatcgttgcatagctgagatgaagcctacttgatcatagtgaatgatttttctgatgtgttcttggatttgattggccaatattttgttgagaatttttgcatcaatgttcatgagggatattggtctgtagttctcttttttagttgtgtctttgtgtgtcttgggtatcaaagtgattatagcctcgtaaaaagagtttggtaatatcccttctgcttctattgtgtggaacaatttgaagagtactggaattagctcttgtttgaatttctggtagaattctgcagtgaagccatctggccctgggcttttttttgttgggaggcttttggagactgcttctatttcattagaggttataggtcaatttaaattacttatctgttcttggcttaattttggtaagtgatatctatctagaaaattgtccatttcctttagatttttgaattttgtggagtacaggttttcaaagtatgacctgatgattctctggatttcctcagtgtgtgttgttatatcccccttttcatttctgattttgctaattagtgtgctctctctctgccttttggttagtttggatagaggtttgtctatcttgttgatcttctcaaagaaccaactctttctttcattgattctttgtaatgttttcttagtttctactttattgatttcagccttcagtttgattatttcctagcatctactcctccatggtgagtttgcttctttttgctctaaaccttcaattgttctgtcaattctctagtgggactcttctccagtttcttcatgtgggcacttagtgctatgacttccctcttagcactgctttcagagtgtcccaaaagtttgagtatgttgtgtctacattctcattaaattctaggaagtctttaatttctttttttattcctttctcaacccaggaatggtgcaattgggtgttattcattttccacgannnnnnnnnnnnnnnnnnnnnnnnnnnnnnnnnnnnnnnnnnnnnnnnnnnnnnnnnnnnnnnnnnnnnnnnnnnnnnnnnnnnnnnnnnnnnnnnnttgccaactatgtggtcaattttagagaaggttccatgtggcactgagaagaaggtatattcttttgtgtttgaatggaatgttctatagatatctattaaacccagttgggccataacttctgttagatcctttgattcttttttaagtttctgcctggtggtcctgtctagtggtgaaagcagggtgttgaagtctcctactataagtgtgtgtggttttatgtgtggtttaagctttagtaatgtttcttttacaaatgtgggcacctttgtattgggggcatagatgtttaggattgagacttcatcttgatggacttttcctgtgatgagtaggaaatgcccttcttcatctcttttgattgattttagtttgaagtctaatttgttagatgttaggattgctacaccggcttgtttcttggacccatttgattggaaaatctttcccaagcctttattctgaggtatcacctgtctttgaagttgaagtgtgtttcttgtgtacagcagaaggatggtttctgtcttcatatccattctattagactgtatctttttataggcaggttaagaccattgacattgagggatattaatgtccattgattgttcgttattgtttgttttggatttattgttggtagtgtcactgtgtgtgtatttcaccctcctgtttcttttcgtgtttggtaaaattggattatctattgcctatgtttttgtgagtgtagttatctttgttgggttggagttttcctttcagaactttctgtagtgctggatttgtggatatgtattgttgaagtctggttttgtcatggaatatcttgctttctccatctatagtgattgaaagttttgctgggtacagtagtctgggttggcatccatgctcccttagtgnnnnnnnnnnnnnnnnnnnggatatctatctcaggagtgattctgcctttatatgttacttggcctttttcctttgctgctcttaatattttctttttattctctaggtttggtgttttgattattatgtgtcgagggcacttctttttgtggtccagtatgtttggtgttctgtaagcttcttgtactttcataggcatatacttctgtaggttggggacgttttcttctatgattttgttgaatatgttttctgtacctttgagctgtatttcctcaacatctatacctattattcttaggttgggccttttcatggtgtcccatatttcctggatattttgtgttaggaattggttgaacttgagattttctttggtctatgactgtatatcctctagagcgtcttcaacagttaatattctctcttccatctcttgaattccaatggttatactcacatctttagttcctgatcgtttatccagcctttctatttccagtatcccctcattctgtgttttctttattgtgtctatttctgctttcatgccttgaactgttttgagtgcttccttcatttgtttggttgttttttcttggctttctttagattcgttaagagatttgtttatttcttgaattttttggttcgtcttttcctccacttcatgtaattttttgcttgtttttcttctatttctttaagggatttttcttgtttcctcttaaaagctgtctatcatcttcctaagataatttttgaggtccatctcttcttcatcctttgtgttgggcttttcagatcttgctggagtggagtccctagattgggtggtgtcatattggtctttctgttgttgagtgtgttcttattcagtcttcttcccatgtcttcttccagtgggtgcaggtgggttctctctatctcatcttgtcacccggtggagtgtgtgggccaagacttcaatgtctgcagctctggatggtcttgcctttcctggtagtctcctcacttggtaagggttgggctggcagaggaaaggggaaggaagagtgaggtgttgccagactcagggagcttttccctgcctgggcgggtccactctaagcaggtgcacgcccagagagatccagtgtgaatgggaagttgggtaggaaaaggacaggagcagagggtacactcatcttggtaggggccaggccggcggaccaggcttagcttattttaatgtttccactgagggatatttaataaatccattccacaaatttaaccaatacttagcaacagtgatttaggcacattttctgagccattatttagttccatcatatgaggatggaacattcaatagcatcagtttcctgaaagatcaagtgaagtttttctttttgtaggccaaataaaatcccagttttgtgcctaacactctgttcagttccctgcaccttaggtttggaaagcagctgtctcagaatgcattagagcccaagcatagtattgaggctatagctgtaaagagcattagcagtgggtagtgacgaatggagtaaaaagtagttctgggcaattgcaaatatgggtgtgtacacacacaccaccaccaccaccaccaccaccaccaccaccatcatcaccaccatcaccatttcagattggtagtttaattagagcacacatctcccccattttatgatatagagaccagcctttgtcaatgcagaaaaacagaacacttaaaaacacacaaatgcaaataaatatgaaataaagccagtgagtgtttacactatgcataccagaagggaggttgattttatgtaatgacaaggcaagtttttaaggtcttcagcaaaatttacagtgacttcggggatttaggaaagcatttggagcaaagtagggtttggggagtttgtttaatgaaacaagaaaataatctgtgagatttaggaggcatgcgtgtagaattactgtactgtgggagtttgaataaagaaagcagtaagtatcagaaaattcaggtgatctggagcagttttgaggtttgaaacgaggcagacaaggagtcaaagtctgggacaataacatggaggcctagtcattttcatcctaatggatgtcccctgaatctctgtcactagtctccagtctgacaaaactaagccagacctgaagctaaatacagactctgaatttcatttcaacagagaacacaccatccattttacatataaaacaaaagaaaatgccacaaactgtcgagctgctgcttcagtggaactaccagtcatttttattttacacttttctgttatcttaaagatatttttaaggctggctattcttaaagcagcaaaagccaatgtttgacaaacatgctctcgtatagcctatttatagctggtgcttggttaatgctacactctgccatgttctgaagttcaggattttctaaactaattaatcagaaatcagagttcttcgtgccaaagattccactctgtcgtggtcttaactgcctgcttcagttggtggggaccaagagttcacacgtctaccattcattctccattcccaacctttatggattttctagcatatgacaaagggccagtttatgcagagaaaacaattatgaaatttgctttcacacacattttgccactatacctttgtctttatctttgagaagtttttgtttgtttgtttgtttgtttgtttgttttgttttgttttttagatttaaaaaaaaagatgttttgaaaggcatctctgctcacctatgcccccagtgctagggcttccagggattcataaagactgaagcagcgattgtggagcctgcatgggtctacatcaggtcctctgcgtatatgctatgtttgttagctttgtgcttttgtgggactcataactgtgggagtgggggtgtctctgactctttcatatgctcttggaaccctttcctcctacaaggttccctcatccagccttgttatgagggtttgtgcctagtcttattgtctatggtgggttgtgttagaggcatgctgttttctgaagggaaatgaaggagggggtgatctggggagaggggacgtgagaggagtagagggaggggaaattggggttgtgatatattcagaacaaaaagtaaattttttaagtggggagtaattggaaagacttccacagaaatagttgtaactcacaaaagtttggcctatttgattgatgaaggagataattacatccaacatatttcaaaattctcttgtatgtcttaattcactactaaattaaaaaagcaagtgaagactatctgtagaaatacacagaaggatttcatcacatggaaaatttacactgttgcaattctatgtggcttttgtggcactcactcttaatgtttagattttgggagacattttacaacagctagaggatagctgccccagaatcccctacatccaccccctgccccttccttctggttccctaagaggcagccagaattctggtggctggtttcatagctaactttattggtgttctgaaaacccaatgcctcaagaatctcagagcactcttttgagacactacagaaaaatccagagaactcccaggagcttagacatctttattactcatatgtggtatgagtggtggcagctagcaagcagggagtaggggctaagagtacctgcaaatgggtaggttgcctacgttctacacctaactccacaaatattcattcattggttggttgtcaggctatgcaacctgtaatactttaccacatttaagatttgtgaaagtaagaagtctaagtggaattgtaacttttgttgtaaatttacccaaaaatcttattgctgaaatctcaaattgcagaaaactggaaatctattcttgcttttatttgtctttgatttttacctttcatgggattcatatctgaatggggtgttagagaaaagaaaaccttagctggcagtcaggagacctggactctgtgttagttctgtctgaggataattgcttttctataggtcattcttcaggcccctcatcagaaaatgacaggtgagacaaatggtgcctgactcgatacatctgaaaataatctctgatcttcccagcaagttcggaaaacaaggagtgtctgcacacacagggatgtatctgtgtatgggcgactgtagggaggttgtctgtgtgtgtgtgtgtgtgtgtgtgtgtgtgtgtgtgtgtgtgnnnnnnnnnnnnnnnnnnnnnnnnnnnnnnnnnnnnnnnnnnnnnnnnnnnnnnnnnnnnnnnnnnnnnnnnnnngtgtgtgtgtgtgtgtgtgtctgtgtttgtgtgtgtgtgtgtgtgagtctgtgtgtatgtgtgtgtgtgggtgggagtgtctgtgtgtgtgtgtctgtctgtgtgtctgtgtgtctgtgtgtgtgtgtgtnnnnnnnnnnnnnnnnnnnnnnnnnnnnnnnnnnnnnnnnnnnnnnnnnnnnnnnnnnnnnnnnnnnnnnnnnnnnnnnnnnnnnnnntgtgtgtgtgtgtgtgtgtgtgtgtgggtgtgtgtgtctgtgtatgtgggagtgtgtgtgtgtgtatgttcgtgcctatgagccctatactgtacatattgcccataatgtaaacatgtgaagtgagatattttcaggatgagaccatcagaaagacatttataaacagctggggaacctgcataagactgaaccaggccacctgaatgtgggtggcagttggggagcttgggcagtctatggggctgctggcagtggaaccagtatctatccctagtgcataaactggatttttggagcccattccctatggagggatactctctcaccctaggtacaggtggggaggggctcctcctccaccaaatgatgtgacagactttgatgattccccatgggaggcctcgccctctctgaggaatggatggggggtgggatgggggattggtgggggaatgggaggacaggagggagaggtaactgggattggtgtgtaaaataagtttgtttttaatttaaatttaaaaaacaataaaaaattatgtccagttttcttacaatgtcaaagaacctcaattgtttacagttgttaatagtattgatagaaattttttcacatacacagattcctttaacctttagtacccagagtgtatacggcatcactaaagcaaaagcagaaagacggggttcttctgaactgctaatccacagaggaggcggttattcgtgaccctaaatagcagcgggttcaaacctcaataagtctgtttgctgtgattatgcaaatgagatacatctgtgtcttttatcagttcttggaaagaatgtaattaatctctgatttaaagacaagtcctcacaacgcagtgctgtctgtctgtcttgtgtacagtatgggttccatggagattcactagctgggtatttgacagttgtagatgcttggccctgactattctgacctggttttaaattacttctctgtccacaatgctcagcactgtcatagttgaagcacagccatgaattgaatagctccacttcaaaaagacagttggcctgtgtctcaaaatcaaactacacatggaaaatgcaagatcaagtcttacactcgctctgtgagggggatgtatttgcctttaacacacctgcccttcagcgacatctctcccatcacgacagataacgttttgaaatcctccccccacataaagtgcttctgtgtatctgtataaagtcatttgacttcatagtccattcaaaatgtgcttcaaagacactcacctaatctatttcttctaaacaatgaagctcgtttgactgcagaaaaagaaaatattgaagaatctactccagtggctttgaacactgcccagggaaagggcgccttaagggaacagttgagactttgaaaaccctaaggagctttgtagctgaaatagccttgtaacctctcaacagctttttacaaacaaaatctttcaagctccaactaaaagagaggtgagcaacaatttgaagaatggggttttcctttgtgccagattatagagcttggcggttccaacctttttgttgtattatatttctgatctaaataaggaattatttattacctgaaaatggtggtattcagatcacaagtctcctcagagcactgactttgatccccaactgtacgtggaggtttggggaggacagccttccttcatatttggagactctaagagccatcctcagaagttgcctctccaggcaaaagacatgagaggctcttgtctctaacattgaacctctcttgcacgttcttgatctcagtttgtttttttaacgcttgtgtcctcagtagcttcatgctttattttattttatgttattttattttaacacagatggaagttccccccccacgagaaaaaaaggggggatatctattaaaaattttggaacaagcatggaaacacacacttaaaaatttagcaccttgtaggctaaggcagggtgatgacaagttcaaggacaaccttgattactgagtgagtctgaggcctgtgtctcaatagtaaactacacatgggaaatgcaggatcaaacctaacactcagctttgtgtgtaaggaggttgtgtttgcttttaacacaagagctacacaaagctgtctttataaaaaggcttaattccacaaattttctgctgtggttatcaaaagcttatattctgccatctatgttgcttgttggtgtgacctaggaagtcagtactcaccatagagcagaatgaagtcttctgactgtacctgttacacaactgtcatttggtaccacaggaaaattggtgccattgtaacacttagccctagagtcatttaaaactttttttcctctttttttaatttaaattagaaacaatcttgttttacatgtcaatccagttccctctcctttccctcctcccctgccccccactagcccctatcctaccccctttctgctccctagagaggttgaggccatccatggggtatcttcagagtttgtcatatcctttggaggagggcctaggggtcatccttgtagatctctgaacatttccctagtgccagacttctatttaaaacaataatggctccctctgttatggtatctcttttcttgctatcctctattcttccccccaactcttagaagagaaagtgggaggtacccttgaacaaattggtatagcagactgattcctgaacataacaccggcagtacagacactgagactgataattaataaatggaacctcctgaaactgagaagcttctgtaaggcaaaggacacagtcaacaagacaaaatggcagcccacagactgggaaaagatattcatttaaaattttaaataaagtagctgaaaaaaattataatttaaaatcaacatctcatattcactgaacactgttttgaaagcagactattccttgtgttctgggaaaccaatcaaagttccttcagttatgaaaatgaagtcaatgcacattctgtaagaggctctagaaacctgtctgaggtaagaaagagtgggtgaggatgtgacaggagtgagcaatgggcggtgggcctgagaacttgggaacataaagacatacctgtagagtcaaatgcatggcacaggcctggaagatgaatctctggcatccacatgcttggttctaacaggtgctaccatacttcatcatgccgtcatctttccaaaactcacagcagtgtacattaacaaataattgttatacacaggaactgtagtcagaagagaaggggagggggggagagaaagaaattaggcatggtagctcccagctaccatagcagtacttgggaggctgaggcagaagggtttcatggcttagaaggtagcctgggttgtgcagtggatgtcaggacattcgggcctaaacagtaagattctgtctcaaacaaaggaacaaacaaaagctaataattgtaacagtagcagaagcaacaacaacaaacaaaaaatatctgatatcaacaaggagatggcctcttgctaaccatggcagtaagaacaacctgacaagcatctaaagcccttccagtttgggttgtttaagtagatattctgtataccagaaaacgttttctgcaaaaggccagtgagtaaataattcacacctggtggtcatgtggtatccattactataacaccaaaaagagaagaagaagaaagccattgacaatacacaaaggaatatatgtctcttttccaatggtagttacttgaaaggtaaatagaaggcccttggtccaatgctactgtttggaattccctagtgtagtcaatagcatcagatactagaataacccttaaaggcagtgctgtattgaagtccagctctacagctgatgctgataggcatggtcttaattcaacaagaaatgatagtgcatgctccatgttccttcatcaatacaaaagaaaaacagtgaaaaattatgttataaaaagtatatctagaattagaaataatattagaacttagggaacaaatgtgaaagtaatcaggaaaaggtttcttataaaagaataccattctcatatgtgtgagtgactgaagattttactcataaagtaaagtatgtgtgagcatatactacatagttttggtcaagattagcacggttcaactcagtcactactatcaacataagtagttggtaaaactacagaggagcaggatagttagctctatttgcctttagtagagctaattttaaatttgaaaatagatgttacattcaatatttggaaacttttaacatatgtgtgaccaaacttcaaacttttcagtgtaactgatatatatatatatatatatatatatatatatatatatatatannnnnnnnnnnnnnnnnnnnnnnnnnnngttaagtgtacaatgcacacgaatttcaaaaccagtagaaatgaagaatggtaggtcatgttgactattttcacattgattaaatactgaagtcatagtatgttgaattaaataaaatatttgtgttggattaagtaaaatggattttcaattactcatatttctttttattttcttttaatgtgatagtttcttttaatgtgtcagtcgatcagtgacagaagtcagggcaggactcagaaatcagaggaatactgtgactggctggctctctggcctctcagatagctttcttacacagtcttggtccagctgcttagccctggtgccacccacaatgaacctaatcctcctgcgtccatcaccagtcaacacaatctctcacacatatggccacaggccagtctgatcaagtcacttctgcaatacagattgtatcaggttgaaaattaaaactaatcaaactagtcagtacactctctctgtgagaagctgggaaaggtgagaacacaagctgtttgtagcacgaatcagttggagataagtgagtaagtccacagtcctgctgtttctatggttcagcttgacttgttgaactgagatgcctttctggaaacaaatccctcttagatagctttaaatttctgtcatttagctgatgcctgtgataagaccaatagctgaaaccttcagttttggtagccaggtgaccaagccacttctcttccacaaactcaaagacaggggagttgctggatgaaaggagctcaagcaaacatgcaactctaggttgttttattttattttatttttctattacctggaggagagggtgtgtgtgtaccacagcacacatgtaaaggtcagagcccaacatttggaagttggttttctccttccaccacaagatcaaggattgaactcgggttgtggagctgacacagcaagcttgtacctgctgaaccacctctctgccccggacactcagttccttctgctgctccgagacagaaccaacttttccccaaatctcatagaaacaaaatgtctcatgacaaaacttcgccagacaaggaattccaacagcctgctctgctttaattctctctcctacatttctccagtgtaaagtgcacaaaaggaaaagtcaaaaagaaatgaagaagagcgggaatcaatttggttcactaatttgaaacttcagtaaaaaaaggggggtaaatttacaatgaaagttgtaattccaacaacacctttgtcttataataagccagaagaataatactattcaaactttagcaggttgcaaagatttgtagatctgggagaagagttagaaaaaaagacaacagaggagctgggaaccaggtcaggcaggaagagtgctggtcttgaaaccataagaagctaaatttgacccccaaaatccatgtgagggggaaaggcagggtatgtaaagacagtcaggtttccggggctctctgaccagccagcctaccctactcccctacttggcttgccgggtttaggaccagtgagagcccttgtcccaaaactatcaaaggttgacagagatgctatagctacacctgaaatgaggcagcctttgctttatattttgcatattcacagacacacacacacacacacacacacacacacacacacacacggaagaaacaaagattaggacacatttaaagagacattgtggaaacaatgctcttctgcttgcctgagaattgactgtgtgggagaaatcattttataatcatatattaatgatgtatttatgacacgtatttttctgtatgtatgttgcattctgataaaaagttgagaaatatgttttctaatcattaaaacaaattaaactcaatattctgtgaccagggataatgtttctcaagtggaagcatgacatgaggaccttgacttgattgaggtctcactaacacactagtagaagtttcattactataaagttggcccttcaggcccaatgccagtcaattgatggccagtacaaaaagaactcagcagtacttttggaattttgtttatttgtttgtttgtctcatattgctttgcttgggcttttttttttaaaccttactagtcttttgcttgtatgatatcatttccaatttttatagattttgtgtgtgtgtgtgtgtgtgtgtgtgtgtgtgtgtgtgtgtgtatgtgtgtgtgttactagtgctgcatttttgttgcttgcttgttctttttagtatttttctaatgtttagggaagaaagaaagaaagaaagaaagaaagaaagaaagaaagaaagagaggaagagaggaagagaggaagagagaaagaaggcatggaactgggtgggtgggaggcaggaagaatctgggaggagatgagggaagagaatatattataaaaaattattttcaatttaaaaaatcttgagtgaaagaaatatagacacagtttgagaatgaggaagtgctgcctccagaattattttatttttgtaaataaaattttgtaaattttatttaatttagaaacaatttcattttacagatcaatcccagttccctctccctcccatcctcccataccccacaccccatcccccatccactccccagggaggtaagaccttccatgagagatcatcaaaatctgtcaggtcatttggggcagggcctaagccctcccccgtgtgtctaggttaagagtgtccctccattggagatgggctcccgaagtctattcctgcactagggatacatcctggttccactgacagaggccccatagacggcccagtgctcctagctgacaaccacgtcaggggtcctggtttggtcctatgttggttccccagctgtcagagtggggtccatgagttcccacttgctcaggtcagctgtttctgtgggttttcccagtgtggtcttgaccccttggaattattttaagtaagagaaataaatgtctattttacttgaaagaagaatgggagaaagaaagaaagaaagaaagaaagaaagaaagaaagaaagggaaggaggggaaggaggaaggaaggaaggaaaaaaagtacattcctgcagtgtacaaatctggacaacaagtatggcttgggtgctagctcatctcagagtggaaatattcagcacaagaagtctggagtcacggtgccaccagttcatcatcatctcctgctcctatgggctagtccactttcttctcaactataaccacctgaccccaaaatcagagactgaaagcaacaccactgcaacttgctctcaaattctgtaggtcagggctttagggacaagctcattttgtgatacttctgtgtctagcactgacaaggttcactcagtgagtctcagctagaggatgggatagtctggactgtctaacaccacctcacttgcatgtgcatgtttgacactagaaactaaacagaaggctatgacagctggccagagcatggagcatgactccctgtggctcagcttctacacaacacaatggcctcaaggtaatccatcttttctcttatcaactcaagtctcagggcacaactgtttcagcgatcagagtagaagccagtgccttctatttctagacaaagtcccatcacacagattgttaggtgaagttaccattaattcacccaggttgaaaaggaagggagatatacctgagcccttaacaaaagactggtggggtcaaacaaagtgagaacatgccagagctattgtggtaccttctatggaaattatctctttcattaaagatccttctctcccccaccttctctctctctctctctctctctctctctctctctctctctctctctctgtctgtctgtctgtgtgtgtgtgtacactaaagaataaaaccaaggccatgaacatgctatgctaagcaagtgctgcactaagcaataccttcaactctggttgatccttttaaactcatgagaacataattatcttatttgaaaaaatagtaataatataagtcacttaaggattgttttaaggagtggcaataaggcaacatatgcttggtacattgtcaagttgtaggaaaactcagagcgacatgctctccttcatcccatttaagatggcagatgctgagaaaaagtagaaccaaaagatggctctgagaagatgcaggtagaatgaagcagagacaatgagagtgggggcatcccaagatggcaatgtagtatagcaatccatgttggccaatggctaaatggaagcattctcagctgctcaattttccctaggactgcccttggtattttgccaagcaagccatgggagatgacttgtttataaaagtcactttcattagaaacaacagattgtcttcattcctagggttactgagtaaaaataaaagagggaccccacttttgacacatcctgacactgtctgcaaagagtaatctttcttgagtctctaaacaaatgaacaccagcctttctgggccatgatggcaccttgggatttagcacagagatggaagtatgtaacaaactttaagtgaaataaatggatctcatccaaacaacccccaatgggcaggtggagggaatctgtatcgcaagatgctttattaatacttgatggaaagagcctaaacccctataccacttgacagttttgaaataaacctttgtataaaaccataaacataggaagctatgtaaattaatacttggcttagtcctaaagcaatattttctactgtaaagccattttaacaaacatcagttgacagccagtcaaatgatgttttgtaccatttttaattgcaaaaaatgcagaaatgcatgaaagacaagatgtttagaaaacataactgtgtgtttgctacccggatttaatgtcaattactgaatatctactagatattaaattagcattatatggagagcataatatgtcaaccaccttgtaatgaatacaaattcatgcattccaaaagtcagggtaatattacttttacataaaaggagttggatagagtcttggacttcaagcttttaatctagtgaacataaaaaagcctacaaatatgtacatattttctaatgtgggcatgggccctgataggcacagagggatatacacagttaaataagagccaattgctattgtcttgagtgctatcatcttgtggagcagacaaaagtacacatcaataactctgttatgaagctcataaagatcaaatatcacaatagagatgaaacatcattctttggggatgtttggaacagacggattcagtgtaagagttcaataaacataaaagttttcttgaagaagtggggttggaatagaaccttaaataacaggtagaaagcacattaaaaggtctaatacctgccaaataggaacatcagatgaaggaaagctctagaagcaggaggatatgaagaatattccagaaagaggcaaatgattacggtgtgagatccatgaagacagggatcccctttacacatttccagaatcctgccagaaattctagaaatttgaatgttaaattgtgaaaatttggcagtattcatttctttgtgcaaagcaatatacttatatacaacaatgcttacatacagcaaaaaaagcaatatttaatatcaatatcaaattcttccaaaattgcataaagtgataatttacacatcatcatggcattaatacttagggaaactcgtggaaatcttaacatgtcatacaaaaagccatgaaaactaaggtcctaattcatgaagcttgatataataaaagtgcaaaagagataaaaagtagagatttaaagaaattaatttcaatgtatttgtaataatgaaaatctgggaaagaatttagcacatagttactgagtaacattctacactgcttaccataacagttaagaaagctaagaggatataattactgccattcccaacttgcccaagacagaattcactgctcttatagaaaaagcaagtttcatgtaagtctcatgacaacaacaaaacagaagctacagcatttacacaaataggaaggagacaagaataaaaggttagcactatgggacatagagcatagagacaataagaaagaaatggagtaacaaaatatctaccaggacacagaaaacgcttagccaattagtaagtacatatccatcaattgcacacttaaattatatgtatgaaactatcctatcaaaagacatgaagtgactgaatgtcacttctgcttcaactatctgtggcctatgtgagacctatctgagttttaaaaccacaagttagatgaaaggaaggggttagaacagtggttctcaacctatggttcaaaaccccttcggaggttgcatatcagatatccggcatatcacatattttcattatggttcataacagcagcaaaattactgttaggaagttgcaatgaaataattttatggttggggtggtcatggcaatatgaggaactgtattaaaaggccacagcattaggaaggttgagaaccactgggttagaaggtatcccacacaacttctactcaagagaagagggtagttgacaccaagggagaaaggtagccatcaacccagctgcagagcttttgatctacagtcgtgttctgcctgtgtaatgtgctattgcaatagtgtcacaaatgttgtgggagtaaccaaccactatctaattggatttaaggcccctccatgagatggaagccttaccggacactgctcagatactcaagaacatgtaaatagataggccctttacctaggggaaaaccaaacatgactgttctgctaacggaatgtagcaatcccaataactcctgaggacatcctgctacacatttagatcagtgtcttgctcagccaccatcagcaaagattcctccagcagtagatagaaacaaatgcagatgcctacgaatgaatgatgtgcagagtgcgaaaccttggcacactcagacctaaataaaatattttcaaccaatccctccccctccgggcttcaggaactatgtggaagaggaagtagaaagattgtaagagcttgtacaaggccttgtagacacaactgaaccaacacacatatgaacaaatggagaccgtggctgcatgtgcaggccctgcacagtccaagccagacgaggtcccagcactgagaggggaaatgggcacaagcacccctccctaacctagaagctgcctccaattgacaactgtttgcaaagggaaaagtagttttctctaacagagaaaagtagttttctctaactctctaagcatacaaatcacacttaaggacagactccatacccagcagttgatagcccacacgaaatgatgaactcaatggtatttttgaggtgttttggttttttgtttgttttaccttacaggtcttttgtttatatattatggtttctaatcttgtattgtgttgagtggggtaacctaaacccagacctggaagaccaatgccacgtgttctccttcatttgtggtttctaactccaaatcttcagaatgagtaaccacaatgcctaagaaagtagaaggggatcatggggatgggtggaaggagctcttaggaggggaaatagcaggatacagatgacacgaaagggacaatgggaaagattgttcctgattgtttaggaatagatgaaaattccttaatgaaataaaggtggggaaactcatagctaatacttcaaccaatcggaaacagcccaaacttttactactaaaacacagaacaaaataggaatgcccactcttgccccttctactcaataattctggaagtataagtgtgtgtgtgtgtgtgtgtgtgtgtgtgtgtgtgtgtgtgtgtgtgtgtgtgtgtgcatatatatgtatatgttcatatcaaaaaagagaaagggttaccacagtagaaaggaagaaggaaacctgtccccattgctaatgagatgattttatgtctagaaaagtacaaggacttcactcaaaattagtagaattaatgaataaattcagttatgtcatagattgtgaaatcaacatgcaaaagacagtagagtttctccacacttatttacaatagcatacttatgagttggtgtgaccaggaaataagagacacatatacttgtaactataaaacattgttgacagaaatagcagcagaaatgaataaatgtgaagatatctatgtttacatacaagaagaactaataatactataatgttcattcttctaagagacctattgatgtagtagatcctcaattcctaatgctatcattcacagcagacaaaatgtatgtgaaccataaaaacatcataatacctaattaatgtgagcaaaagaaaatgaaacaaaaacaaacaaaagccacccaagcatcatagtatttcctttaaaacatattataaggctattgtaattaaaacaaaatggtaccagtatgaaacagatatgatgatcaatgtaacaagatccaaaactcagaagaccctggtatttattgtcaattatttttaacaacagtatcaaaaatatacattggaaaaggacaggatcttcaataaatagtattggagaaactgtatacacatgcatgcaggaaaataaaactatacctttatttcaagacataaaaacataaaaatggcttaaaatgaaaagcttaaatttaagacctgaaaacataagaatattaaaaggatagctggtaaaaaaaatctcaattatatttcataggaaatttttatataacactcaaagtatagtcaacataaaaagtaataatcaaatgagattgcaccaaactaaaacatccccatacatcaaaggaaacaacagataaaggagatagctcatgaattgggagagagtctttgataactatctgactcaaattcaagtgattcaacaacaacaacaaaatgaaagaacaacctagttaaaaaatgagtaaggacttgagcagacatgtttcaaagacagacatgtggtctaggttcagtggctcatgcctatgctctgagcacaaaggcacccgaggaagaatcatgaagacattgtattctatataccgtattctaggtcacagtttcataaaacaaaaaggagaaaagaaaagagatatataagtgatcaaaagacacaaaaaacataatcagaatcatttatcaggaaatgcaaattaaaatgactatgaggcaggaacacccccttgttagaatcagtataaacagtctttataagtactggtgaggatgggagaaaggggaaatgtaatacaaggttaggaatgcaaattagtacaggacctaaaaaaattgtactagaagttcctaagaacagcaaggatagaattcccacctggtcccatactgtcaaatgaggattactatccatatagaaagagaaaaattgaaattgatgtgttaaaaacatatctgtcctttaatgttcattttaatgttatttatctataatagaccaagttatggaagcaacctaacatttctatagaagagcaaataaataaagaatgtattatattaaaataatggaatattatctggctttggaaagaaagagatcttgccatttgccatgtagcagcaaactttaaggatgttattatgaaaagtgaaataatccatacacagaaagaaaaatcttgaatgctatcatttgtacaaggaactgtttttcacaaaaagtcaaatgcaggaggctggagagatggctcttgttgctcttgcagaagacctgaattgtattcccagcactcatatctgaggggttcacaacatccagttattcatgaaataaaaaactaatctgaaactttgcatctctcccacccccttttctccatcatctctggttcattctcctgctcactctctctctttcccacctcctcattttgccctttataattatccccttaaaaaagtctttttttttctgtattgtataggattccctgtgagcttccctgctttctctgctgtaattctcaagttgttttcaatatgtgtgatattaactaatcctaattggctgagtaacaggagccagcagcctatacagtattaagccacttctacaccacctattttctgtatgcaaatcagacagaaacaaatgtttggccccagctgggcaaaacgtcccatttagaattcttttcctcttctttgttctttgatgttctgcaaatgagctttagaactccactcttcacacaattcaattttacagacccattatctgagatataatgtggaggttaaatatatcagggcagccattatgtgaaaataattaacagtaatgaataatgcactaatcccactgatgagagatggttatatgtgtaatgaagtgttggggcagccctgacaaatgaaattaaaatatttaaacactgttttatgatattactttgctcatataatttcctttacctacgatgagccacttggattatcgtcattatcttgacagctctgaaggatgagatactgcgggttaatgtgacagcgattagtcagaggggaaatccatcacccctggcagaacaggctgaggcagaaaaaggcccctgcactgtcctgtttccaagcgagaagaatgatactatcaacatcacttcaatattaaatggatagaattatcttgtcattcagttacagcctctgaagaactacctatttgtacctgcaaaggaaaggtcagcctttcttaatcacccataaaaatacgttgatggatccctcgtatcaataatagtgacaggaacagagacagcgaaggcacatgacaatttaaaagcaagaagttcctccctgaactctttaaaaattcccccttccctgtaatttctgattacattaaaacagaattcgaaggttccatctgaagaggaattcgctaactcactcggcttattctgtgatcacttcatcagactccacgtatgaaagcaggttctgctctgttgaactttatgaatattattcttaaaataattactcctccctcccaagatgccacatgtgtaagtcttaagggtctgatgatgcaataatctagctgtctattagagctgatacaaaatgaactctaaaatatatgatggagaataattcattgataacttgaacagaagtgattacatcaccgatatccattcacatgaccctattctagtttatacactggcaggagagttatcatttccagaaattttctggaaaggcacaaaatatattttcaactagcttaaaactccagttttaagaaattcttattttgctttaaaataagaatttgtgagtgaagaagccaaagttaaaacaagttcccagagaattttgacccaatattttctctgcttctgatgaccagatggctctccacaatttgcttctgagaaagtgagacaatggagatgctgatctgagagttaggccaaaggtcagctccaccttcccttaactaattgcaacatcttgggaatcttcctaccaaacaaggaatcctcatttagactgtagaacacagcatgttttgtctggtaatattgatagctgagtttaaaaatcttttttatttagaatcaaaatccagttgcagaatagcaaaaatatcagctttgtaggcaaaactttctgaccctgtcctgctagccttgggatctaacagcacgtcagcctatcacatagtaacaaatactttaatgtatgaaacacaaagcttagtgtctcttctactgtatggatatagcaagtgtgtgatcactcctaacatcaatgagagaagtacaaagatatcaggaagtcaggcctagagacagaaacagtcattattgtgagggcagacagggtgtttggagaacaaagcacgatataaatatataatataaatatataaataaaccctttggtagcaatggtactggagaatgagttaacactaagagcaagcactggcttcatgacatgaatgtactcataactgaatctgttgttcaaaatagcaatagccactttgtaagaggcagcgttggtgttgatagatttatatgaacatataattggacttgcaacactatttttgagttctacttcattgtcacttatgcagatagagctgaaaaattaaatacacactttaaattatcctcatttacaaatgtttagagtttatgatgtgagttatctgtctctctcagcagcaaagaatccttgaaaaaatcatagaaccctgcctgtgcttcttgtatctgaaaaaaaaaaattacaatttacttcaattacctgacaatgaagtgccttggcaataaatctaacattaaaaaatcatttccagcaaattactccaataaaatcaatgaaggtcaggctcagctgtagcaacaaataaatgacatgctattgacaggctagtggacttcattgtcatttataaaggttaaggggataaataatctaacagaaagcagatgtttactaaacaaaaaatggaagcaagtgagataaatccagagggtaagttaggcatgaagaggctttggcatgtgctggcctagtcccatgacaaaattactagttgttcgaatacttggcagcacgcatgtttgactgggtcaatatttatctgctctgggctacttcgtgatctttctaccttttatatattgaagtcatgaaacagattttctcttaatagaaaatgaagaattgataaaattgaataacagtagtcaggttaaaagcagtttgacccatttcaaaattccagtaacagcatctttgagaataacaaacattaaggtagaaaggttgtcatttctccactatgaaaagcaaatctctaattgtggctttttaaaaccagatataaacctagatttcaaacattggtatttggtttaaaacttctgtttgcacacaaactctgtgaaacagaccagaccaaatcagcaaggccattcccaggtaatgaattccctcttgcacatgtcagtaatgtgtgcagtgtgtaaaccaaattgtattatctgtccagattcctcacaatttgccttacctggtaaggcctaaggttctatgaatcaaaatgggctctcaaatataaaaggaataataacatttggaagagattcagtctttccaaaaaccatggcttcatagaattttcaaaagtgcaaagactcacggatcattggatctgacctctttgttttaaggagaaggaaaaagaaccagaaggagtctttgcctaaggaatctcagacataactaggtcagaacttgccccaagtcacctgattcccaggacaatgatctaaccacacagtctcttgatctgaaatattaatggggaagaaatggcagtatctatttcctacatacaaaataagaatcacctcttacattaaactataggatctggtatcctcaaatgtgctcacgattatccgatctcttggctcaaagagctagggtcaagctactcaaatgaaaatcttcctcttcttcacagaatacactggtgacttgaaagcatcttgtcctgctttatacatgttcccagacatatccatgccctaaaatagtgtttgtggagcatttgctggagggatggctcagcatttaagggcatgcattgccttttcagagaacccaagttcagtttccaagcaacaatcacatcaaactccagcttccaggaatcttgtgccctcttctggattctatatgtaattgcacacacacgcacacacacacacgcgcnnnnnnnnnnnnnacacacacagagagagagagagagagagagagagagagagagagagagagagagaacgagaggaacactttaaccttattttaaatatcttgtaaaaggggaaagggagaaaaggagtttgtatttcctcatgctgaatctttgttagcttggctggcttggaaattgctgtagctaaataagacttcccacaatgaaatacagtaggtgtgagttttatgtgtgtgttgtcaataccttaaaattattcactttttcttaggaaaatgttttaattgggtaattcctaaaagaaataactatatcagaaaagatatattaagattccagaaaatgacttaatttatttgggacaacataaacctaatattatgtattcttctaccggctcttctcatgttgaaaatttaaaatcgtggacactctctcaatggctaataagaaaagtgttcataattcaagtattagttcccaatccattgccttttgcttttggatcccatatgatacgctatttcatttataaccacagtttaaaagtaacaatatttttatgcattgaaggcacagtttgtaatagtcattgctgattaaggattcaatgttacattcagggacaactgaggaaaatttcactgaagcaaatacttgttaatagaattgccctaggaatactcctaaagagcacttcccagagacagcctaagtggcagggagcactcccatagacagcctaaatgagagggagcactttcccacagtctaagtggcctagggaatttgctcttttaaacatatatttttatttcattattcattttacatgccaaccacaggtacctctccctcccctccttcctctcctccccacccaaccctctccattcctcagaaagggttagggcacctatggggagtcaacaaagcctggcacattcagttgaggcatgaccaagcccctccaccatctggggaatttgtttttaaaatgggcatttcattataaaatttttataccccagaagtaatacatcaaccatgcatgtggaggaaagtaaagccttgggggagtggataaaatctcactttgagtagccttgttaattccttctataggtggaaatgaaaattatttttctcttctttgtattccatttggattttatgtagatttagcactaccagcatattggtgccaaacggtaccgaaagttctagacaacgtcctgaaatcatcataaatggttagttgctcccactgaacccctcagagcctacttccaatattgcctccacacacatggatttataccgcactacttcacaaagaaatagtgtcccaagaaagcggcctccagtattctctccattgactcagtctgtcttgtacatgtccacaaggcacaagcttcaagctgaagatcagaaaaacaaagcagtcagccgctagctctcactctacctcagactgaaaggctattctagcttgaccaaacctcagactttgtgtctcctcagcgtggctggagaattctgagacttcaatgttgtcctattctcaatgtggctggagaatgaatgccagctctgagaccctgttcctgtcttaaatctctctcatgagtcctgggattaaaggtatatgatcccaagtgctgagttcatctttgtgtgagctgtttctcttaggagtgatctatatttcgtgtagctcagtgtggccttgaaataacaaggatctatgtctacctcttaattctgagtcctgggattaaaggtgtgtgcctggcttctgtggctcatggctgactttgctttctgaatcctcaggcaagctttaataaatcataaataatatgtcaccacatagaactggacatccgcctaccctgcttccgaacttaggaaatgctttcttgttatttccctacagaatctgtgttttatatcacttgccttttctatacttcgggactttcacagtttcccaacacatacctaccaccccctggtcagtagtcaactcccataatagagaacaacagagcacatcttcccagttttgggatgatccctcccctggtgtgccaaaaccctacctatccttcaaaactattggaatggctctctctgttctctacgtgcaataacgtttgcacttgtccagtgttgactttgtaagtatctattatgtgaatgataccaggtcaggtactatcagaaaaagtaaataaatgtctctgtgaagcaggtgaattatatctctgaagatctttctagtatttctggcataagtaagaaacaccatcagaaaagagctgctctgatggaagtagaagcagacacccacagctaaacactgaactgaactggaatccagttgcagagaaggaggagtgatgagcaagagggtcgagaccaggctggtgaaacccacagaaacagctgacttgaacaaggggggctcttggcccccagactgatcactgggaaaccaacatggaactgatccagaccccatgaatgtgggtgtcagtgaggaggcctgggaggtatatggggcctcttgtagtagatcagaactgattcctagcgtaggaatggactctgggggccaattccacatagagggatactccctctacctagacacacagggaagggcctaggccctatcccaaaggacatggcagactctgaagaccccatggaaggcctcatcctccctggggagcagaaatggtatgggataggttgggtgttagtggaggggcaggggacaaggggagggagagggaactgggattgacatgtaaaacaatcttgtttctaatttaaattaaaaatattaaaaataaataaatcaaacaaaaaagaaaagagctggtaaaagccatggaggctgcaaggaaacagaaagtctgttggatggagaaagtggtgcaacttggaagtcaacagcaaacattgttgtttgaatatcaagctaacaccaaagatgcagaaaatgatgctgcactcaaatagccttggttgtcaggggaacagctcttataaatcagcctaattatgataactttctgaagaaggggtactgcttgacaactgtggtgtggagaccagaaagaactgcacagggcaggagtgaaggggtgtgccaaggcgcagtgctggaattcacttcatagttatatgggtgtgggaagactctacccacggacatggtgccattatgaagaggtcattcttattctcatcattttcagatccagacttctttaccaaactctgacctcaggtgggcaatttgagacagaccagcacaactcctcatctctataaccaggtttctgtagggggagaaatttttccacatagatttaaatgaggaagcttacccctcaaaggcaaactgctgctggctgctttctaccaacagcatcattcgattggacattgtgcctgcaaaaagactgagagaaagaataaagaagtaaggaggtgaaatagagagagaaagagaaggagagagagaaagaaagggagggagagagggaggaatgaaaggggagagagagagggagagacgtaaacaaggggggggatttaaagaataaattcaccttcgattgcaatttttttaaaaaaaaatcagccaaatcattttatccgtggttcatggtgtattattgaagctcttcgggaggttatgttaccagattaagaatctgtgacataaagtcactcgtccagtgaataagggagtcagagttcattcttccaagtgaatcagaattgctaagcagattctccatgacttatacagattcaaaggcaagtaggaaagtgagcacaaaagaaaaaataatgatgaattcaaaaggtaaagaatacacacagaaatgtagcccgtagggaaattctgatctcttactaaaactctttgtaaaggttcatttgccctgaacattgcaccagctaaaggcgaggcatctggaaaacctggaggtgaagggctccagaattgcttcaagaaccacagaaaccaagaagcctattgtctgggacaccatggtccttgctgttcttgttgtgaaaactgtagtttcagtacatgatctgtgtcaatttaagtccaagaaaatgattcttctctctaattaattgttatgtttctcttatatactttgtaaaatggtggccctgcttgtcttggcattgagagcaggcttgtggatgtagctgtctggctccatctctcaaccaggtgtttgttactaagccttgctgcctagtctgcgtcctcccaaacacaggagcgtcctcagattcaagtagctcttgttcagagaggaactatccggggacaaaagcctgggattatcaatgttgctatccaaataaaactgttggttgttagcaagaggaaagactgtttcacacaaggactctctgctctttcttaaaaatctatatttgaaatcaatgcattccttgggtctgacatgagaagcccccatccacttggctctttgaaaactcacgactcactctccccatctatccatctacttttctctgaaaaaggaaagagataaactaccagtgagaaactttactatatcaaaaataatagtgggaaacacagaaggcttaaagtgagcactgtggccatttgatcatagggaggcttttcactgacagttctctggggacaatgtggccttactaagtaaaatgaaagagttagtgggagacaaaaccaggtgcagaggcaaaccacctagaattcctgctgtatagttatatttccatgtctctacacatcgttcatcataaacccaactatctgtagttaaaacgtccagaattttgaaaatgcagagatagccctgctgatatatccaacaagaaaaatattgagaacacatattttatgattttcttttcaaaaaattgtttttaaaaagttataaacatgttttttgatatttggaaatttatgaagaacagagtgttctgtgacaccatgaaagaaaatagatttgtatttgagaaatgcaagccagactactcaggaaaaatataatcagaaaaaataataacatcattggtaagacaatgtgaatcaaagcatcaaccattcagaaaagctgtggaggaggtcagtagttgtacattgtaaccaatgaccaatcagtgatgtaatacttacaacatgctgccttaataggtaaatgtcaccctctaaacatccagtcttactactatatcagcttttaaacttggaattcagaacttgacttttcccaacaggtttaagatgcagtggtgaaaacagcacagattaaaaacatggacttgaatgaagaaccaagttgggaccaggtttgtgaaacccacagaatcagctgacctgaacaagggggagtgcatgaaccccagactgctagctaggaggccagcatgtgactgatccagacccctgactatggatgtcaatgaggaggcctcggcactctagggggcccctggtagtggatcagtatttatccctggtgtaagaagggactttgagagcccatccacatggagggatgctctcttggcctggacacatgggggagggcctagccctggcccaggatgatgtggtagactttggggatcccccatggagtgccttacccttcctggggatcagagggggcctgaggtgggggctgctgggggcttgagaggagaggatgggagggagagggagaagggattgacatgtgaagcaagcttgtttctaatttgaactaataaaaaatttaaaaaaaataaagcatggactttgaactcaagggcaatggagttttaagagtactccagcatttgctagttatttgacctagagccagttactaatgttttctgagatactcttttttccattttattgaaaatgcattttttctcaaataatgtatcctggttacagtttcccttccctcttctattccttctagttcctttccattttccctcccatctgcatccactcccttcctgtctctcattagcaaataacaggcttctaagagataatagtaaaacaaaatataatgagataaaacaaaaactaacacattgattgaatagtacaatgcaaacatacagagggaaagagaccaatataagataaaaacagatataagatacagaaagggataaggtataagaagatataaggtataagatataaggcataacagatataaggtataagatataaggtataagaaacagagacccaattattcacacatttgagcttttttgtttgaaaagttaaaatatagctgttttgctggaatgctatcagggtttttttcattattgtaaattttttggcagacattcatatgtataagagaagactgtgcattttttaaaagttagagcacttcataattccctgtaactgtgaatagaaatctgtagatttacacagagaaagttttgggggtaaacaaggctaaacatattttcagatttttctgcatgaaatgcatttagaataatacttcagaaactcccatagaagccagattcttctcatttcaataatgatgagcctgactactgtttttaccaatgggctgtcagcagacacatggcatacagatacttgaaacatctagacattttgctggctatccccacttcttccagcagcactaaaacaacataggttgagcactcatctcccacagacacttagggattagccaggcttcctcataaggaccccatctggatttttgaattgtcatcatatagacacttgagtgagctcccctgaacccagcctggcatctctgaccctcaatcacggtggaataaatgatagatgtttacagaactgggtgataggcaaaggtttttaggggtatttctctggcaataattaacatttttttggctgttgtactttcagagtttctgtgggcacattcatctatttgtgtgacagttttaaagacatatctttgtcctttaccaggaccatagaacaaatggaattggtggtttgagaaatagatgaaaaacttgcaatctttaatataggcatatatttagagtcaatgtcctaaattggagaataaggtcttcaaatggctctatgatctaacagttctttaggatttcaagctccaatgaaaagacaagaaaataaacacaaaagtgtaacatattctctgccccattcacaaatgtttaacagcaacttcctctcaattaaaaccattgtatttccaaagacagtaaatatgtcttgcctatcaagtgtttttgaaaaaaaaaagtagttgctttgagtaacaaaaacagtttaggcaaataaccaagtaaaagtggatcagaaataaatacatcagaaacattttacttttcttgccgttgtgtggaaagctcaggctcctggagacattgcagccaggtgtcatgcaaggattgtgggctacagttctgatccagtgtagggcaaagcaatatgatcttgggagagaaagttggaagacatgttcataaatacagaataattaaaggtctattcaattggcttatacagttagaaaacctctacccattgtcttgaggatatgtaaatcattgcatgtggttttgtctaggaagaagaaattgtcattaataacaataaaaaggctaacttcatgccttgcataggtgtggtgggctaaatttgcataccctctatgataagaaactgaaactcctaagatctggcaaggaaatggccaaaaaagtataattgtcatacagaaaaaatatattatgtccaatatatacagaagtttctaaaaataatagtggaggtagaataaggagactcatttatcaaatacaaactcatatttttaaaaaaaaggaaaaaatcatgatggggaaatgcgggacaaattcaggaatggcactacaagtaaaattatttaaagaaaaaatgcaaggaagccatgtgttggtggtgcacgcctttaatcccagcactcgggaggcagaggctaggtggatctatgtgagttcgagaccagcctggtctacaagagctagttccaggacagcctccaaagccacagagaaaccctgtctcgaaaaaccaaaaagaaaaaaatgcaaggtgtacttaaaataaccaaattataacagagacaaatcatgtgaccaaaaatgaacaattaaaaatacccacattttctggtgcgcattcacaatggacttgcagctgtaaagattgaaaataaagctaagaaatttgcaggtaagtggatgaactgggaaaaattatacttgagtgagtccatccaggctcagaaaacctaacactctgtgctgtctcttgtatgcggaaaccacctttgaacttttaggtttgtgggttttaacttagaatatccatggtaactagaaagaggccactgggggtcccaagagtgtttctaagtgatggggatagtaagtgttgtgaagggaaacggtaaataatggaggatgctttaagtagagaaggtgacaggaccagggcaaagtgggggacaggagaaaaagccacatggaaatcaatattttataagctttcttacattttattatatattataaatggtaacctttattcttaagatcctaatgatgaaggcttcatgcacacttgggtcaaaggacatagaaaaatcaagctggtattgacctggaagctccctccctactgagctgtcacagtgacagaacatgtcaggcaggctgatgagggagaaaaatcaccaacagtcttacccagctgccaatactttgagctatagtcatgactgacctaacaggatttgccccttggtgcaatagtagcatgaatgttatgggagtttccagcctttctgattgagcctaaggcccactctccacagaataggatacatgtataatattgtaaacctgaccaagaactgatggctaaaaaggtcacagatactcaagccgaatctattaccatcattttgttaaggggaggttgtaatcaaactgccttctgaattcttacctttattttcattgattacgcagctctcaaccaccatcagagactcttccttttgcatgggactgcagtcaatatacacactcagaaatggtcaaagagcagaaaatacgtgatggcggagtgctcagccgctattgcaacacctatattagatctctttgcctcaagattcagcaaacatcacagaggaggtgctaagaagattgtaagagccagagacataggaggacttatgtgaaacggtgtcttctggacatgaaagggactcacactcaagagctttcagcagttgtgactgcctgcataagacctgcaccacactaggcaaaactctactacagatgggggaggagcttccaagctgccacctttgctgggtgctattggcagttcatggatactgggggtattggaatccttttggaagtatggcctctgataggtttcccatattctggtgggtctctatgtgcaagaatcttccttcatttttctgcactaagtatttggttttccactaaaacgtctctctgcttttgtgtgtgtgtcccccagaatttcttttattagtgttttaaaatattgtagggctctttcactgcttcagttagatgtatttctattgattttattaggattagttctgtcactgggtttttgtcctttcgacatatgctatattgctggattccattctagtctcctaattattatttgggcagggactattatggacttttttattttgttagtgtattagtggtatatgaaatgttgctttttgtttattatgtttcctacaactcactgaacttttctgttttagttttagtcagtatctttagggcttcctgtatagaagatctttctacaaaagaggttgaatatacctcattcctttctagtgatgtctttcataaaacttcctttgactgttctgactgagagcagcagatgtggacaccctcatcttttcagatctcaaaggaaatgccttcagctttttccacttagcacatgggcgcagtgtctttatcatatctggaactttttgggtgaggtatgtgaggtttgttttcataaagaggtgtttcactttaatgaatgttttttctggacccactaatgaaactgttttgatcctctctgttaatgttgtaatacactatggttttcagtttttattcattaattcataattaataatccataacaaatgggcatggcaaagcaaagctgcttgctcacctcatgagggacaggagcagggtgagagaacaagatacgcctttgaaggacacactgctaaggacctacctacttcttctagctggacccaccactcatatttctaccacctcataatagcactaccaattaaggacactttattacataagctttgggggaacattcaagatctaaatgttaacaatgtgccttttgttggtatcacatttaaccctgacgtttctttgctgaatttttgtttggatgacctgtccacttatgaaagtgggtgctgagatcccctattgctataatttttcaaaaagtgtctcaagagagaaagactccaggtgacagagctcaagagttcaagtgggctttttttcttttaattatggggaaaggatcgtaaaaggaggaatggggagggggagactggcttccagggacaggaccagtgggagaaaggaaagagagtcagaggcagatggggggggcagagagagagagagagagagagagagagagagagagagaggagagagagggggtgggggcagggcccttttaaaagggaacacagtgaatgtgcacaggtgatgctcttagtgactgcagctgagggcatatcctgtcagaaccccaaggacaggccagtacagatgcctgaatactgacattcctccccttctatttattataaaaagataaggtgttagaaaggggtcgcaggtgaggcagggatgaggacaccatgttctcgaagctactcactgcttacctgaggggtgtcattcattcatctttgggggacctgggaaagttggggtgcttgccacatcctggagtttcacttcactgtccaggctctgtggaaccgtcaggtgcctcctggacctggcaaaatgtcgttcttggtgaatccaaatcaactccctagggcttaaacctcctgatcctttcccatccccacagtgtcactggacttgtttggtcgtcatgtttggtagtcatgtttggtagtcatgtttggtagtcatgtttgagcgggtagtcctgcaagcctcctggtctatggccaacagcgggtagtcctgcaacagtaactgattaggaatggtcagtgggtctccaaagaacatcccaatggaagtaaggatgtataaatgatgacacagctcccatgagtgaggctgagaagacccaagagtctacagttcctatcctcccaagaattcagagagggttgattttgacacaggcacaggccacccagtgagtcgtcacataaagggtgacggccgaaagctcaaatgagcccgagagagctatggttgcctggcaccaggacctaacaagaccagaaggcaaaaaaacacactggagagaggagatgagtcctcactcgtggaaatagtcagagatggagaaggaggaggggctcttcactcatgcaggttttggatggagggacccagtgactgggttatatgtagacccagttccagggtcccagcatgccacaaactgcctttgggcaggagaatacaccaggagagccttcccagtcatggaaccaatgttgtaatttaaaaaaccaatcaaacaaaaaacgctcactcgagagaaaaaaggcatgtgacagagttcaaatggaggaagttttttttttaattaaattaaaggaccataaaaatgggaaagggggtggggagactggcctccagagacagcagcaatgggagagaggaaaaagaggcagagagagggagggagggagggagggttgtcagaacaatgaaaattacactctgagggaataaccaaaggggaggaaaaactattgttgttttggggtctatttttccctttagatctgacaaggcttactttatataattatagcgtgtgtgtgtgtgtgtgtgtgtgtgtgtgtgtgtgtgtgtgtgtgtgtgtatgtgtatatgtgtctctgtgtctgtggtgactggggaggtgtaaacaagcacttattcacccagatagggcataacaacaaaccaaaatacaattccaccaaagaccaacttagaaaagccatccagttttacaggcttatatacagagtatgggtaaacccaagctgagtagaccagtagaaaatctcagtgtggatgatgacttttccatagccgcacagatggagtccccttgtcattcaactctacacactctgtatacagtcacagcctctgagaacaggagacttcgagcagctggaacagatgtcagtggtgagagaatggcttaggtcacaggtgaatagcaacagatggtcttcttcactcttctaagagaatgtcaacaggccccaatcttgagagtatcttgtaggtggccaccttgtaggtttctgatgaatagtcatgactgctatccttggaggacaaaatcctacttcagtttatactagttatttcttcttactcaattggtccctctctctttttatagtggcctttgttgtctcctgttagtaggtcttatttgtcacacaaaattagtattaatcataatgaacattaaaatctaaattattcctgtggcaacaggtacacagttcttaaagataaaaggagggaacagatagaaatgaaaccccagatattcatgagataatgtcatggcctcaaaatacacaatgccaaaattttctaggtataaagaaaaaggaacagacctaccatctgattagaggtatttaaaatttatcatccaaaaatatatggataaagcattcatgaaataaacgcagaaagaaactgaacagcacaaacatatatagaacagtaaacataaaaacaatgcatagaggaagtggttacaaagtgctgccaagtcctaaccaagaagctattcacagtaggtccccctgacagaagcaaaaacagctttcatcagcagagtagcactgcctgtatcaaacacactccaagacagacctcatgctcaggatctggccaatacaaaatggattctctatatttgttttgattttgtgaccatttttgattgtgttttggtttttttccaagaaagaacgagcatgaagttggatgggttgggaggagatcttggaggtattggagggggagaaagaatataatcaaaatatattgtatgaaaatgctacaaatagccgggcgttggtggtgcacgcctttaatcccagcactcaggagaagcaaccaatatgacatttggtagatgaatagatacattcagataaggttgattcataaaacagactaccagtgatatttataaagaaatgaactattatgctaatacgaagataagagaaaaacttaagagtgggatactaaacaaaggaactcagcctataaaggctacatagggcttaatcacaaatatataaaatttgtgaaagggtaaagctatggaaactaaaaagagcagaggttatgggaaatgttttcttgatttttatttagtttgcattatagtgtgcatgagagagagggagagagagagagtaagagagagagagagagagagagagagagagagagagagagagagactgcatactgccctgcatatgaggaatcaaaggacaacttgtgacagttgttttctttccactatgtttcttccagagatcaaactcaggttggcagagttgagagaaaagtgcctttatcttctgagacaaatcactggtccaggttgcaggattctagagtaatggaaatatgctgtatgctgctacaacggtggttagatgtcatgtgtctgtacaaatctatataaggcacaatcctgcactaacgtttactgtaaccatgacctttggagagtagggttgtgtttacgtaagttcatcagtagtcactctggtgggaatactgataatgggaggggctttgcatgtgcaggaacaaaagataacacagggttatccctattctccataacttaattttgctatgaaccacaagaaaatgaaaaataaagtctgttattaaaaagaattcatatgatttagatgatgctatagagattctggatggaagcatttcttcccagagggatgaagggcgttcacaagactctgaagttccaaagcttagaagaactgacaagaatgttacaagactcacaaggccccgcctccagaatacagaagtcaaaaacagttgctggggagaggagacccttctgtggagctgcctgcaggtcgtctggggaattacagtgatgcatctgtcatgcatgatcacgggcttctagtgatgtgcctacccaagtcacccacgcatctgcagggaaccccgcatctactctcctgttgttagcccaaaatgaacttgttgattcaccgagacagacttgagtggagctatttcctttgtctgtataacctgtctggtgaatagatatttgctctcatctccgcggtaaaagtcatatagcatataatattttaaataataccaatagtgatatcaacagcaaatgatagtttaaaccaatgtgtacaaaatagagactattttaaataattcactggttacaaaataatagatatcgtgatgtacacacaactgaatgtcataaataggtacacttgaatcccacaaaccaccaaagggacagactaaagagcgcttagaaatttgtttcaggatctggaacttcatttttatgacagaactattatatagcaaattgtctaataagcagaaaaagattcaaagatcaataggtttagcaaatgtctaaagtgaagagagtaaacaaatctaagacaaaaacctggccaaaatttgagaaatttgtcaccaaatacaatctcaccttaagtaaaggattcttcaaagtgaattcagtacttacagggacatgttttatgtatactttagttttatcaaacacgtatgtattaagggtttgagtaagcatagtaggttaccaggcacaggggtgaattagacacagtttctgttttcaagggcacttagactgctgagagaggtgaacaagaaaaagttcaactgttggataaattatggaaagtgcagagttttccaggtgtgttatacacggacacttggaacaagcttgaattctagaataagtgtgaaaaatgatgtgggggtttccttcctttcacctaactctcacaatgtgatcaaaattcaccagaaattatactgtcctgcaatatccgaaggaaatttccaagtaattcctcaacttctcacttgtgttgctcaagtcagttcaaaggggaaaatgagttaattctgttcacagccacaagtgaatagaagaattgaaggaaggcatcccttgccaggtcctatgtaaaactaagaatttagaaacagcagtcagggcaggcaatggaatacggtgcacagtattatctttttatttatttattatcagtcttaacagtcagcatcccaaatggaaagagcactcatggggagtgacatggcattggttactcctgggctttctggaggagcacaatcctaggtgtctaggagggacagattgagactgattagtgagaacaggagaccagcaccatcagctgacaagtgcaaggcagaggcgactgggagactggaaatttttatttaactattcctagttttaaaaacaaaactgattaaaatcactcaagcaggttttcacctgttctgttttcttcagaccttgaacttcccattacacccaaatcagagtgagaaattatatataaggagaggtctagacaccactttaacgagtctcaggcactttgctcacaggggattcttctggagcattttcaattctgaaagaaaatacatgacacatggaacacagcaccccagtactattttgggggagcagtctttgctccccaagcatctgctgtagtgtgctaacagctgtttgactgcaaagggcttctctgttacatgttctggacagagttgctagatttctggaagatgttctttttttttttttttaagactggtgtttgtgcaactctggtgcccagttaatcacatttaagctttttctacactgtgttggagtaacttcaaggacaaaccatgctgctttgagtcacttgttacaaattcttcaaaatgagctatcgcattttgaactccctgtgtgtgcgggcatgtgtgcatattcgcatgtgtgtgtatacacgaattcctgtacatgttttagaatttgagcaccacaaataataagtctctcagaatatgttttgcttgttttccagaacacagggatattggggtttcgttaatttccatgtcaatagctctgcagagtcaagagcagcagcctccactgggaagtccatgcaggtctctccaaggactatgaacaaaagaaaaaagcacacagcatagaaacacaccagaactctgcaaaaagaaactcagaaatttgccacttacttctttggaggaactagctctggtttggtttctcttggcttcaaacatggtcttctatgtcaccttaaagagctcagcttccccaatggttaaataaaatgataaaggcatctgttttcctggcaatgtgattctagattcaacttctatagtcagtgtgaaagaacagaaaaagtcaaggcaaaatggactatttaaatatttctataatgtaaagcaaaaaatcccctgtaccatagcaaggccatgttaaatgatagattttattctctgacctaaacagttctaagttgttctattgcctcgaaataaaattttccagagcggtgtcacaagtggtgccatggagtctgagctgcatgctatcagcacatatttctatagaaatcaattacacgtaatgtcttttcaaagaaccgtttaaagcaatgcagggactttcaccagtttaaactctgttcttacagggactcagtctagtaccatgagtaagttattgcgaaatagtaagtattgcagtcaagccccttagcaaagagtgggtataaaggagtttaactgaaaatgctgagtaagatgatgagtagtgatttataggttatggaccatgtcagcattgagggttcttcaccgcgcctgagggtggttcaatttccacgcatggccaagagaaaagttgtagaggaaagggaagacctatatgattataaacgggcagcatagtggaacataaggaaagaaactgtgctgatggcgtcaagcccaataggaagagggttgctgatgcagttcacatagctgttagatgcaggcacaatgaatgcgtgcatttgttgaggcccaatttgcaagaggacatgtgacgctcccatttgacctttggagttatagaagcaagagttttgaaacagacccagttagctgcctgtcacaatgctgggacagatgtatcacttcccgcggcccgggtttctcatgagaaaagcataagatgagtaagtcacagggttaagtaacataaccgacaaatggttagcacgctgcccagtacacggtagttaatcataccgtattaactaccttcctttctgtttctgggccatacttctttctcattgccaccatttgtaccaggggccagactttggaaactttacaatctggataataaaaaacttcgtaaaccatggttgcatttttccagcaagttatgcagcacctaaaagagtcacccaattgtcacctccattgctgtttgctgctcatgcaactgttgagatggagtcctctctaaatgttaggtgagtgagctatggggccctccatgctactgagttgtgtaaggttcctggaagtaaaagaacaggggatccaggcatagagccagtctgtgagttcagttaggggaagaacaattgtgacgcctaaaggcagaggccgcgcctgctcaaaagctcagaaagcagccttgtgaagggcaggtgcggttgcctcgcacagaaacgggactaattgctcttttcctgttctttcttctatcacaccttcctactcagtcccgattccctttgcaatagaatcattaagtcttactgaagagggaaataagccctcctcatttattaaccacttctcagtttcaccgttgagaagtccgcggtacctcaaacctccaactcctgtgccatcttgattaaggcacaaaatgttaaaagcaaattactgtgaaacaattcccacttaatgtttcagtcatatctgtaaaaaatatgacttaaatatagttttattaataatacatattttaattaaacggctggaggtgcatctagcaggaaaaaaattgaatcttcccgggatttcacatagtggcatgattcatgggcagtaaatatgcaaagctttatgcccataaggcaatcagactccaaagccgatacgcgtgtttttgtctgaaagagtgaaatccagcgaggtatagtaataatagtaatcataacagactgccggaatcatcaaatgaattggctccggccaacagcatcctctccgtgcaacagaagcatcctttcaaccgcaattatatcgtctccaatattcattattacttctgctattctcattacacaaaaatcctgcttatgcccatgtacctattaaagaacttcataaatattgactgtagcaaacgatcaaatgctagggaccacctttgtggactcagaaataaatactttattgcaaactgctcgttgttgctatgacgatgatgatgatggtgatgatgatgacgatgatgacgatgatggtggtggtggtgagagaggtggtgattcctgggagcactcctcttcagttcctggtgttgacaattgtctagtgcatcagttaaccagagctgctgttgcaggcaccaaaggttctgaacctcaacagtgaaacgcattttctcatggatttagaaggcagaggtctgagatcagggtgtcaaggagaggttttctcctgcaactgtagaatgtcaccttctcccacgatcatcatgtgatcttccatctatgtctatttcccagtttcctctgcatataaagcaatgagacctattggttcagcctcactctaatgattgccttggcttaattattcaagaacattctctctaaatacaggatcattctgagatacgaggggatgtgatttcaacaaggggcctttagaatggcaccagtaatcctataacacctggcaactactttgagcttcagaaattgatactatccaccacatgccacggtattttaccaagaaaaacctgttaaatgtataaaaacaaaacagagcggacttaagatctctataccatcacccttcaaataaagtttgtgttaaaatagccatatattaccctacagacactgaaaacgtcacagaacattacaattttggttcagtcattcacatctatttctaagcctaagactgttacagttatctcttgtgtgtcatccctactggtctttcatttctagagacgtagaatcatttccattcagcctaaaaacatgtcatttagcttcttttatagagaaggtaagctggagacaaaccctcttattttcttacacacacacacacacagagagagagagagagagatagatagagagagagagagagagagattatttaacatgaaattgtaaaagattcatctccaaatttcaggtttttggattaacagctcttcatttccagttttaaaagggttttctgtcatctccatcttccatagattcaggtgagaagtccataatttaggtcattatccacctgtgtgcaaggtgttattctctgtatgtgttactttccactcaatcctgatttttgccagctctgtgatttgtctttcgttgtgtttacttatggcttgacttctgtattttttgctttttatcacatcagggttcattattatttccttaaatgttgctgtctcaatattccattaggattctattctctctttttgcatcatctgactagaacttgaatttctgtttgtttgtgtcaacctattttgttctctgttctttggactcagtattttccatcagtattttccatcaactggttttcaagttcagtgattctctttgattttgccatactgttactgagcctctcagtgaaaggtttattacagatgttagattttcaattctaaactatccatttgtatctttttgatacttaatttttcccttaaggaacaatatcaactttcttttcactctattagcttaatctttgacaatttcaaacatgtatgtaattctttcacaccctctctactgaaatgccaattttctacctcatgggttagggctgcaaaagcttctttaaagtctgcttaatagtttagtgtaactgtcctttcttctagggattggtcacattttcctgttgtttgtatgtgttttatatatgcatagttatgggccacatgttggacctgttaaatgttgtattccatagatcctgagtactattacaattctttgagaagtgtttatgtctctattttagcaatcaatccatttagatacagatggcaagttctttcatctcttctggtgagctgcaattcaaagctcagctttggtcatgaggctgtgccacaatggctgaggtctaaatcattggggagttttcaaggtacctgtgtgttttcacaccagtaaatggagaatcctttttccaaaataaatggagaattctcttcaaggtttctccaagacagagagatgtgattgttgtagatcataaccaactctgtcaaatagttacactcctgaggctcatcccagaaagaatgccaagaataacactccaccaattccttttgggaataaccaaaacctgcctactttgctttatttcaataacaagtctttaagatgctttagtgtttcatcaccaggtatttttataagttttctaatttctagttgcattcattgaataacatagttttgattaagatagttatgtcatcgtagtgaaataaaagtcccttgacttgtctgggattctccttttagcctcaacaacaagacaaaccatgtgaaatcctccaatgaaactaattctgctcaacctgtgtcacttagggaccctagaaccttacctaaaaacagatttgggtatggagtaacgtgatgtagtatctgctagaagagggtgcccatccctagtatgtaggtcaagatcagaagtagctgacagtagagttaatcctaagggcccagatgtattcattcacctgagtaatttgtgttattagaggtttaaatgcacttctgaaataaaatatgatttcaaggaaatccacccaccaagtgaataaagactatgaaatgggagcaccccaagaaataactctttattcgtgcctttaagtaagccacatacagccctagacgagcttcagaaatggggctttcatttccataaatctatttttactccaagggggcaattataattaatttgtacatggtcacaaaatgaatatcagcagtgcctgaaagtgcacacattaattcatctagtcaagaaaagtttttgagcacctacatgtgttgggcacagttcaatacatcaaaattgtcttaaaggagaactgtaaactaacaggttctaagacctgttacaatctttggaatgagcagtaattctcttcctccttcccacaattacattacttctgcagtttaccttttgatttattagcatgtttttcctgatttgattaatgtgttatatgtgaggctacagtgcaattataaatactctcaaagtgtagaaagtcatcgatttgaaataagcatgatatctcagtgcacacgtgaagcttcctttaatggtgccatgtgtaatggctactagtaattagaaaaacagtggccatgcatcaaagatagatgcaatggagcagagctattactgctaccaaaaccaaaaaggggggggcaaatgctttgcaccacgttctgccaggaactcccccaccccaacccccattagtaatctgggcatgctatacctcttccgcagatcaacaggcaatctcaccaactcatgcgatgagaccactctcccctctccagagactaggcttagttttcaaggtctgtaaagggggcatattcaccattgataaagagcagaaagacaggaacagttattcaaacatcaaaagttgacaatgtgtggacagagaagaagcttctagccaagctgggtagtgtgacctccatagtcacctctgacctgacacctttgtcccttcccactctttccaagctcctgttttctactataacctcactctgtgagagcatgtgtgcatgcatgcctctgtgtgtgtgtgtgtgtgtgtgtgtgtgtgtggtgtcaagctatttaaaaatagtaacctcattcattcagtgtgctggtttctgcacattttttaatacactatgccaggcactggactaagtaacagagaaacaaagagcccaaagttgatggagatttgcctctgggtcatccacttccttagtgagactttgggccattttatgctttgttctcctccctaaagcctgatgctgtctcttacctgtatctactgccaatccctgctcctcgtcaccagattctactgttgtggcagaccgtcgccatcctgtcttccccgccacccacctcctgcctcgggagttaaagaatacgtgtggatcctgggaacgttcttttttgtgtcacattcataaaaaaaaaaaaaaagctaaacccaagatttaattcctactccctcaaagcctagagcataacaaagggcttaccctacaaaaattaaaagcacagaagttacaaaagcacaaagtttggattttcacatttcctagatcaatgaaagtaagacattctccctgtggaaattaatgcaagtttaattctatttatattagnnnnnnnnnnnnnnnnnnnnnnnnnnnnnnnnnnnnnnnnnnnnnnnnnnnnnnnnnnnnnnnnnnnnnnnnnnnnnnnnnnnnnnnnnnnnnnnnnnnnnnnnnnnnnnnnnnnnnnnnnnnnnnnnnnnnnnnnnnnnnnnnnnnnnnnnnnnnnnnnnnnnnnnnnnnnnnnnnnnnnnnnnnnnnnnnnnnnnnnnnnnnnnnnnnnnnnnnnnnnnnnnnnnnnnnnnnnnnnnnnnnnnnnnnnnnnnnnnnnnnnnnnnnnnnnnnnnnnnnnnnnnnnnnnnnnnnnnnnnnnnnnnnnnnnnnnnnnnnnnnnnnnnnnnnnnnnnnnnnnnnnnnnnnnnnnnnnnnnnnnnnnnnnnnnnnnnnnnnnnnnnnnnnnnnnnnnnnnnnnnnnnnnnnnnnnnnnnnnnnnnnnnnnnnnnnnnnnnnnnnnnnnnnnnnnnnnnnnnnnnnnnnnnnnnnnnnnnnnnnnnnnnnnnnnnnnnnnnnnnnnnnnnnnnnnnnnnnnnnnnnnnnnnnnnnnnnnnnnnnnnnnnnnnnnnnnnnnnnnnnnnnnnnnnnnnnnnnnnnnnnnnnnnnnnnnnnnnnnnnnnnnnnnnnnnnnnnnnnnnnnnnnnnnnnnnnnnnnnnnnnnnnnnnnnnnnnnnnnnnnnnnnnnnnnnnnnnnnnnnnnnnnnnnnnnnnnnnnnnnnnnnnnnnnnnnnnnnnnnnnnnnnnnnnnnnnnnnnnnnnnnnnnnnnnnnnnnnnnnnnnnnnnnnnnnnnnnnnnnnnnnnnnnnnnnnnnnnnnnnnnnnnnnnnnnnnnnnnnnnnnnnnnnnnnnnnnnnnnnnnnnnnnnnnnnnnnnnnnnnnnnnnnnnnnnnnnnnnnnnnnnnnnnnnnnnnnnnnnnnnnnnnnnnnnnnnnnnnnnnnnnnnnnnnnnnnnnnnnnnnnnnnnnnnnnnnnnnnnnnnnnnnnnnnnnnnnnnnnnnnnnnnnnnnnnnnnnnnnnnnnnnnnnnnnnnnnnnnnnnnnnnnnnnnnnnnnnnnnnnnnnnnnnnnnnnnnnnnnnnnnnnnnnnnnnnnnnnnnnnnnnnnnnnnnnnnnnnnnnnnnnnnnnnnnnnnnnnnnnnnnnnnnnnnnnnnnnnnnnnnnnnnnnnnnnnnnnnnnnnnnnnnnnnnnnnnnnnnnnnnnnnnnnnnnnnnnnnnnnnnnnnnnnnnnnnnnnnnnnnnnnnnnnnnnnnnnnnnnnnnnnnnnnnnnnnnnnnnnnnnnnnnnnnnnnnnnnnnnnnnnnnnnnnnnnnnnnnnnnnnnnnnnnnnnnnnnnnnnnnnnnnnnnnnnnnnnnnnnnnnnnnnnnnnnnnnnnnnnnnnnnnnnnnnnnnnnnnnnnnnnnnnnnnnnnnnnnnnnnnnnnnnnnnnnnnnnnnnnnnnnnnnnnnnnnnnnnnnnnnnnnnnnnnnnnnnnnnnnnnnnnnnnnnnnnnnnnnnnnnnnnnnnnnnnnnnnnnnnnnnnnnnnnnnnnnnnnnnnnnnnnnnttccaggaaaaggggggattaacatactggtacttagttgggttggtaagtacaggaaagcttgaattctcctctaccttagattgcaggtatgcatatatttacacttttaacatttatttaattttttatgaatttcataaaggagtactgtatcgataccattttaagacacattgcgtttctcaatttcttgaaggcaagcataaaagccaaacaaagaaatggaatgattgaacaattcaggttgaccaagccagcatccatgtgattccccacctttaccagctcagattctcaagtaagcatagcagaagtgttaaagtaaaaaacaacagtggccatcatttgaccaggacatagataggtatgtaagaagttcatgatctctgtccaggacatactaaaaataagctatgcagtcagctagataaagtgccacacacctgttatcccagcacacggcaggaggacacaaacagatcatgacatgaagatgatcttgggctatacacagaaggtgggaccagcctgggctacatgaaaccctgcctcaaacaggacatactaaaaataagctatgcagtcagctagatagagtgccacacacctgttatcccagcacatggcaggaggacacaaacagatcatggcatgaagatgatcttggcctatacacagaaggtgggaccagcctgggctacatgaaaccctgcctcaaaaaaaaaaaaaaccactatgcaaatttatcaccacaattctctcagaacacacctaatggagggggaaaagaaagctactttcttactctaagttagactgttgattgccctcaattcatatgtatgataaatgtaaagctaatctgatttggcctggttcaaatacatccacttcatgctatttgagtgtgagcaggttttcctttcttcctatgactatgtttccttagttatgaaatgagattaatgcttaaattgcaggcaggtgtaggacgtttaagtggcacaaaatatttggtagacagtgccaaaacacatacaggatacagaaaaccaatagcactgtcaactttatctgttccatcagtatctgtacccagcagcctgcaatgacagaaaggaagagggaagttggtccactaagtaactttcatggacacgcaataacttgaagacctactcacagcagccctgaagttctgtaaatttaaaaaaaaagaaaaagcctataatatgggactctatacatgcagaattactaactactagtgcagactccataaaaatcccattctatttatatgctcataccctgagtacctgaactaataaaattgcattaatggctatttacataaattcacaattctaaattagacctttaatttctgtaataaaaaagaaagtggctcctgcaatttcccatttttattttcctacatggaatacggtagctctaacataatgtacgactttgtgaatatttccagggctgctaatattttatctaatattatattttgtgttttttgatctctgacccccgtttatactcccagaaccctcatgagcaatgttcactatgataacccttggtgaaagaagcagggctaaaattgaagttaaatcatccatggcttggatctctcaaggaggcctctcagggtcaggagtgattttttccatgtatatttctctactttaagaatgtttcttaaatatttgattcatcaggactgaaatataagccctcttttcgaatagatcactggcaaacactatagagtgtgactatgaccctgagttcttcttgcctttttttttatttcactttgttcattatatcaatatatattcctacgtcctctggggagcaacaaactgaagaaagaggagcacaggagaaaattatgagacaatacagcttttaaaagatggcaaacgtaatttatcgacagaagaagaaatagaaaaacattatttttaaaattaaattgaattggtgccttaatatttacaaaaggtgatgagtgtttgaaaccaaaaaatggatatactttcctcaagggaagaaaaaagagttattagaaagaattaggatcaagtgaggaccagattatgaggaggcataacacattaggagcaaacacgggagggttaggatataaattgtaaatgggcaggaaaggacttaaacatcaatggtagcaagtagaggaaggcacagggcagccataaaaccacagggcaagccgtgaaccagaagaaagagaaactggatcactaccaataacacagctttgtgactcccactcacaccaaatcacagagctactcgaataatgtgcatttcccacacactgaccaaagcactgggggcctctgcaaccgattcacagccagtgccaaaggtctccgtccttgtcccattcctcctacatgggacacttcttttccgtgtctgcattgcttcccacggcccaattctggagtttctagctttaaaagctttgctgctcctccatcgcctgtaggtactaaatccagattcctgggcaagggtctccgggatttgctttcatttctgcagtagctgtttgctctccagcttcgatggaagtatagcccccaaacgtgcaagcatttctctttttttctgctttgccctcctctctggaatgttctttctacctttgaccacaacctccccccgccagagagtcctctcaccttgcaacccccagaatgtttatttttgctactttttaagcctttagtgccaaccaggatgcctggcacacacgtcagtaaacacacaagtaaatgatcacacagaaccttccaaagttcagtaaatactttttcgttcgcttgtttcattgtcacctccattcacttggttctgtttttcttcttctctaggactgagacagacgggcatttgaccgcaccacaggcatttcaggcctgagacagcgccaatgcgtgagcaatcaaaggactggactgtgaggtgcgggagaagaggctcaaccttggagctggactgggctctgtcttgtggaagctcacgcctgcttcttcctctgtgtgtttctgaagacattgtccctgctctaccgctgactgattatggccactgagtaccctcatttgtggcatttgtaccccttcagctagggcagtattccattatcctccccatgattttggtattgcaggggctctagagatcggagccatgggtaactggtaacattaaaaggttaagagtttgttcttaatcaaacagtaagacagtaatggcactacaaatagaaccacattttttacattctcatttcctcccatggaaatgagcatacttttcatttgctaatgaactacaggaaggtcatagccgtagtcttattgaaatagacacccatcaggtaatgcgctacagaggtgtttgtatctatctatcaactggctattacgttagtgcctactctgcaaagggcattttgtacagaggtgtttgtatgtgaggtaattactcaatctatcaactggctattacgttagtgcctactctgcaaagggcattttgctagattatgtagaagacatgaagaaatgtagggcatcttcccacacttccagatcccaaagtatataaacaattctctgaacaaaagaaacaattctctttcataatctgaaacccaaaagatattaaagtggaattaaccattaaaatatgactgctttctgccaggtgtgatgtatctgtacattcagtgaatccgccttacaaaagaatttatagggctaaagtgaaatcacgaaagatagatctaagatcttaaatctgcaagcctatgcctgagaacgtagcttagttagagtgctcgcctcgtgtgatgccttgagttcagagcccagcaccatatgaaagatagatctaagatcttaaatctgcagcctatgcctgagaacgtagcttagagtgctcgcctcgtgtgatgccttgagttcagagcccagcaccatacaaatcaggtgtggggatgctcacctaaaataataccactggggaggagactactaaagaattaaaagtttgaggtcatcctcagctacttggtgagttcaaggctaacctgggctgcaggagacagtctcaaaaggagagagagattggtagaaagaaagcagcagaaagcatctcttcagcccagactgcctcattcacgctcacatttatccattcgttcgttcgcctgaaatgtaatggcgaaagagagaacagcacgaactgggaattcaaagctgcagaggccagagagagaaagaaaggctgagctgagttccacggcctcccattgtaagtcctcatgactgtcataaaactcacacattcatgaaatcataagggaaggagaaagaatatcaaatgataggacacagagttaaccaagatgccaggctgcagtacagacacacagagagaagggatcctgagtaaatatgggtcaatgctagaaggatttaaagggagaccacagatggctgaggtacagtcatggctaggatatctgtgttattgttttaaaagggatcctgagtaaatatgggtcaatgctagaaggattcaaagggagacaacagatggctgaggtacagtcatggctaggatatctgtgttattgttttaacctgcttaggctaccataataaaatgttgtagactgggtggcttataaatgacagaaatttcttttttacagctcaagttgctgccagatttggagtctgatgaggccctactgattcatggttggtggtttcagtatcttcatctagaagataagcatttcttgggtctcttataaaccagccataacaatttgtcccagtgatataatcccttcccccaaacccaactcatgatagcaccaccttcagggttgaaattccatcacatgatttttgtaggggcaaaagcctttaaaaccatggtgattaattatatccagtattcagcaaatgcctactatatgccagacactgtgcttaggtctagaaatacaaggacaaagcactaattagaaacagagggaatggagcaactgggggtggcatgtagactgtgtattgcacacatgatcatgaaagacatagaacactctgtggagcagatgatatctcaagagaacaaagtgagggaccctgaattgaaactctaatctgacacacaggctttgtggccttgggaagtttatttcaaatctctcagcctcctgtttttcatgtgtgtaaagggataggttagatttcctatgatagtattgcttctatattacttatctgaagccaaggcttgttacattatccaaacaagaaaagtcattttattacacagagtctcagaataaaggaggaccatgacatatttgttgcactagaagaagtttggcatagctggagaaccaagggttgagaacaacaacaacaaattattctcagcaagtttggactctctgttatttgacattttcataaaggtgggtcattacttaaagaaagggctttcatggtttcaaaactagaggcatgcccatgaagataaagtatacatactgtcttaggaatactttagaccttcaacacccaggataaggcaagcggggagaggagtcaaggaaatctatcttctgatttaagcaggagttactgcattgttccttgaggtaggcaacagtaaaggaagagcatctaatattaatcaaatttcattacaaatccattctgtacaacatagatttgcacaaaaagaagggaggggaggagaagaagtacatagtggaagaaaatgcaagtttatatgggaaattaatgatcatataatggccatttccatttaaggcaaggaaagagttctttgggtattaatgttaatttggagaagaaaacaacttacagtcagatttatatcatatacaaaactagttgtatgtgaatctaaaatgcaaatatgaaaggcaaatgtaaaagtaaaacttatgaaattatttgtatgatcttggaatggtaagaagttgcttaaccaaattagagctcagttgccatggggtagggacttctgctattctagaattctgttagttaatggtatcatgatcagggccagcatatataataagggaatatttaccaatctgttaaaaagaagatgctgtctgcatttgttatttgagatgcacaaactatcttgacagctcaccctacctttcaatagcttactgcgttctgagtcccatctaccttcacacagtaaaactcagaaagctcattcttctgtaacccattgcaaaattatctaagttcttcctcactgtaactactgtacagactcaagatgacatgttgataagtagaactgagcctgtatctatgagatttttctatcacaagctttctgatagctctgggtgataaacaagtttgctgactcactcctccagagtggaaaactgggagatctcaggcaattcaggagtggaagatttggagagagcaactgagtcttgctagctgtattgagacaattgcctgatgctacaacacccagaacctgagggagcagagctgcatccaggggttggtgggccattcaggaaagcatagcacagtgcagctgaactgtgtgtgtctcttcttcagtgccagttagtgtttcgtgtctgtatccactgacatttctttctttggacccctcatccattgattcctccagtcctcaacatcttttgatagattctcaactgtgcacaaccagtcaattcctattgttactacccatagtgcagggatagtctctacaaattgaatttaaagaaaaacatctaacagtcggttcaaaggaaatataggtgaggaatacgcataagcattttgtttaaaggtaattaaattacaaccatatgaaccatatgaaaggatgtctgtcctcatgatgtaagaaagttcaaatttaaacaatgaattagacacactatttttactcgttgtattggcaaaagttaggaaatcgaatgcataactgatcaaagtgctatgaagaaaaatgtcagtagaatatttagccacaaactgaacccttatttcctatgtacaacacataagactcagggaccatcaagaaatgggaagacagaaagattctaggggtcagaggaggaaatgtaccagagagaaccgttgtctttggacagatacactcatgaacacacagcagctgtgactgtctacaagacaccagtgatgggggaagtacttctgcgtatatgtctctcttactggttaatgaataaaacactgttggccaatcgggaagcaagatgggcaggactaggagataaagaggattctgggaaatgtagtagggacctccatgtgccttggaggagaggacacaggagtctagcattctcggtaagataagaccttgagaaaaacacacacacacacacacacacacacacacacacacacacacacacacacacacacatatgtatacgtatacgtatatgtatatgtatatgtatatgtagttaagggttgttacttaagacagagttagccaacagaagccctagacactggccaacagtattgtaactaatagagtctctctgtgttattttggggactgaagtggcaacaggacccaggcgggaatcctgcaacacaccagtaacattctagcgtggaatcagaaggggctcctgatctgaggagctattgacagttgatgacttctgggggaaggataatcagggtttggggggaggctgtgcccctggtagatcaaccacaccccagtgtatgattccacacacacgacacccataccttagaaacacacatttgattcagtgggatatcggggtgggggcgtaaagaaggaaggagacagtggggaggtggggttctggagtttagggggagaagtgcatcaaaggaagttctcaaagaattaataaaatattatatttgaagaaattatcgctaacatcttgcaaaggaaccagaaaaaaaagcagctttgcatgctagttgtcaatgtcccttcagccttaaagcaatctgaaaactgctataaagctgtataaatacagctgcccctgagctaggagccagcaactccactctttagaagcaaagactctagtacaggggatatgaaaggttgtttgctacagtattgtttgcacccactttttaaaaaagcagttgattggattttatttcattcattatgcaatattatcttgcatatgtgatcaaaattttatagtatttataccataacctattaccatgtttgaatacatgttacaatgcatgaaactcaatgatgttctctgtgcactgggaaaattgtgagtgggaatgaagccaaactcagaggtattgagagagagagcaatgttcatggttaacacgaggaagacacgggagaaagtgaggggaaaaacacaactgtgaagtggaatttgccttgtatgctattacctgatgatgtaagaatatggagcaaaccatgaatgacaacctgacataaaagcacaatactcactcacgagcgtttaatcatctgtgtttgtggtttcttgtcttatcttgtagcttcataaataaaatttggagagaaaaagcaagttacagattaatctggaccccattgttttgtttgggtaaaaatacataagttctctgttgttacctcagaaaaatgactggttggtatatgtgactgggactttatagctttttctttctctttgcattgttatgtgttccacaagaatcaagtgctactttacattttttactgttgttgaaaatcataggcttacaagaaaaggaaagagtttacaactactttcagctaaccctgtcacactctatgtaagtgaggatttcaaaactgttgtgtgtatattgttagtattcaggcatctgccctggcctgtccttgggcttctgacaggattcaccctcagctgcagccactaagagcacagcctgtgcacattcactatgttcccttttaaaagggccctgcccacctcccatccttctctctcctttctctccctctctctgtctgtttccctctctctccctgtctctctcttcccctcttttctctctcctctcccctgctcctgtctctagaggatgctcttcccccttccctttcccctttttatgatttctttcccaaataaaaaacccctctgcttgaaccctgtggcatggtgtctttctctcaggcaccacttttcttaaattacaacatatatattagaaaattttaaacattataaaacaggaaagcaaatgtttacttctatatactttgaattttgagttttttaatttgaaagaaatttaggccccacccctttataaagaaatacagtcagttagtgagtgctgaaagaggaggaaacaatgggttctcatcaactcttctcctggacaggtgctgtggtctgcttgtgtgtgacctcggaactcatgcgctgaagcctccctcgttgccagggtggtggtcgtaagacatggaaactgaggcagcattgatcatatgtctcctcccttgtgggtggaattgtcctccttataaagaggcaaagagcccctggggagcttgtatacttttccacacatgagggcaccttagaaaccaccacccgtgtggtctctctccccagacaatagagctaccgtctccctgaccttggtcttcccagcctctagaactgtcagaagacttgctgtttaaaaattaatcagcctaaggtacgttttatagaaacctgaacagaatgataaaggctttccatattcacaaaattattcttattatgaaaaacacaattattttgttgttcaaaactaggtcccttttgttatcatctgagtgaaaatactgattatttgttgaaaatcaaatgagggactagtgagatggctcagaaagcaaagcacttgttaccaagcttgagagcctgtttgatccctggaacccacatggtggaaggaacaaaccaattctctcataggcacacactttataataaacaaattaattattttttaaaatcaagaaggaaataaaatgatgaaaggctaattgaagcatatggataagatacaaaactgggaaatttttcatttataacattttcagtgaaaggatgcaatgaatgtgtaaaatgaattaaacaagatgtaaggggctcagggagtttaatctaaggaccagagagatggttccatggaccaaggagcttgtcttgaaaaccttgaaacacttgaaaaagtgacttaacttttcgacccatggtaggaaaacccagcccagaaagctgtcttttaagtttgacattcgtgcattcaaaccacccacataacaataactataaatgacattgtaattatatgaaggaaattcaatctaagtctttagtgtagccatttaagggtacagtttaggttgaacaatacagaaagtgggcagacttcaatgttaatttaccttaaatagcaatgagaccctgagatgggattaagatgaagaatattgataaccatttgcaaataaaaaattagtttttcccaacagagtctcactggagatacaaattattcttaaggggaaatcctatgcccagcagtagatagccaaaacacaaccaactcaaaggcagttttggaggctctttatctcataatgccttgttagggctttacctcatacacacacacacacacacacacacacacacacacacacacacacacacacacacacacacactttaaaggtcctttgtgcatatattatggtttctgcttttgtgtttttataggagttctgtgtgtgtgaacatgtatattcctgtatctatatgtgcttcctagcttttttctttggctatttttcttctgtttgcttgttttgtctaattctggttgtttgttattgttattgctattactattattgatgccagtttgtattctaatgagaaagaaaaagaaaggtgtggatctgggtgagtggagaaatgggaaggatctaggaaacactaggggaagggaaaccctaatctgaatacattgtgtaaaagaagaaatcaattttcaatttaaaaaaagagaagttggagacttttaaaagctaaagaatttccatgacttcattgtgcatttagaacagttttccaaaaatggttccaaagagttctacactgaaatacaatcattcttactgaagacattttattttttgcactaaaatgagctacccataaataaaacagattaaaatatacccgtccctgaaagactgttagctttgtgattgctaataaagtaatgacaataataaacaataaaaggatctgtcactctaaaaaaacaatattttaggacgaagacagcaaatggctcgtaagccttaggaccagtgttgctgagtctgagctgcccctgaagctcatttctcatgactgaagaaagatcacaaggctgcagcttaatgacagtgtggataagtgagaggacagggctggaccgaacacatcctagctgctccatcatgtatgaggaaacagaacatcccagcactagagggaagggggaagccagataaaagtcagcccatcatttaaaactgaatcacacgactcttatctcatggacttgtgtactagcatctctctctactgctcaggccatactccttgcccaaactgggctaaaaccagacacgtatgttacaaaacttccatgtcacattgcctttatttcacctaatagaaactgagttctgctgcagattgtctaccactgtaattaaacacaaaacttaaataacataataaaaatcatcatgataaggaagtaaaaggaatgttgatttttctacatcccaaaataggatccaccaccttaatgccttttccccatcaaagtgcatgatgcttagtcaaactgggatgctaccatggttgctgccttccaactctttggtaagcttttatgggtgccatttatttatcttagaaataggccattactgtagcgttgcagaaaatgtcactttattcctgtgtcacatccaaatagaaacaaaacttaatttccttttttttttctttcagattttggtaacatagtatcgctaaaccaaagcagacagcagctgtcctctgtctcaagtcacttctcctccgagcaaagtcaggtcatgtgacattccccactcatttatgttttccctaatgaaaggatgcctctttgtgcctcaatagatagtttagattttttaatattgttagtgttgagagataaacactttggtacatattggagagtaataaattgtgttgaacattgataaactaacgcaattaccagcaaggtcagagagtcagctaatttagaaatatcagtcctaggattttgagttgtcccctggagaactgcggccactttattacagcaggagggtgaggagaaaatggtgcattaggattgatctcttgatctaattgtgggactctgccattccttgtttgaccaaaaatgcttagttagcaagaggaagcatagcacaactaattgaagaccatcccttacacaccagacacactaaaggaattctagaaaatagcagacaaactgcacttgaggttattgggaagaggttgttaccattccggtgcacgtttgtatttcttttgtaacgtgtcttcaacatcatagtcataaataaaatttaacatcttcaattcatttgagcagaagttttcattctcctgttcatgatctgagctggtgaaattctgaggaaatgaagtcatcagtacccccttttttgatagagacataaagttgctttctgaaattctgaggaaatctaaatgaagtcatcagtacccccttttttgatagagacataaagttgctttaggattacctaagcatccgacagattttcagagctaggaagcatctcatggtcctcacacatccatcaacactgatttcgttgcttatggataatataagagctgtgcaaacttctatctaaacctgtttacttagactatttaaattgattccaaaagtgtaaggctaattatctgctcacatcattattgttctgatataatttagtttacatctcgcccagtccccatcaggtcctcgtttctaggactacactaatttgaatgattgtattaaagtcaaactgagtaacatcctgaacccatggccaaaacaaagttcaattgaaatgagattcatgtctggctgccaggcacatcacaggcaccatcaaaccgtgttacttgggaaaggcatttcaaacgtaacctcttccaatacataatcccatttgacaaggagtttacaggaagtaccacagtggaaaacaacagaagcctatccatgcagcatcttggaaaggcatgagactgacaggttgacaaaacatcagagcctcagactctaatcctggttggtaacaaaatgccttaaaattgtctcctgataggagcatgcatgcaaatatgtaaatcacatgcaagtagtaaatctagaataaagttggattatctgaaaatgtccctctcaggtattatatctccaaaagcaaaatcacttccgtagatggatttttattcaatagcctaaaagacaatcaggaaatagaactaaaaatagtgatatgatttgctgcagttctgattctaaatagagtcattttttccataggcaaggaggctgacagaaaagggagcactcttagggagccgaggggagggaaggcatcagagcggagtgatttaagacaatacttcagggtctttgccaagagcccactcagtgcaacactcttcacaaacacacacagacacacacacatttccctctgtactctcacttgctattaactatggtacaaggtacttaaagctctctgaagaatgttgatattttaggaatagggtcttgagactacagctagaacactcacagttatgcatggtgagtgcagactgacctaatgcatgtaactaataactgatctcaaatagatgcagagggaggcccagctgtctgccctttgtctacagatttcattcttaggacggggctgggctaatccctttgtgatgtaatcagctccagggggttagtcacttacactgcattattgaaaggatgatgaactggtgatgggcccttaacagtaagattgtattaagcagaatatgaggccaaactctgtagctagaggatgtttggagtgttttgttttgttttgtttctttataaaaacagttgagaccatttgaaaataagtctaaatttcctttccaggaaaaggaatccatatttggcataaagaaatacagtaactcagaaaaatcagaatatgtttgtataatacattatatattattaaaatacagatattatattatttggaaattcacacaaaccaaatgatttgtcacaaattatgtcccaatttgaaatgcccaattcctgcagtttcacaaatttgaggaaaatgactttcagtgttattttgagcctggcatcataagatgtgtgtctaacccttatcaaacatctcactggctaagacctatgtgttcatctttcgagggcagtgtggtgtgttctttggattagtttagcaatccatgccctctgactttaggattcttcaagactgagcacttaatatttataaaaaaacaatctctcaccaaagaagtcaatgttacttttcctggtttcaaaacacagcgccctcaaataaattggtttaaaaatgcatcacataggatattgttttcatcagaaagtactttaaattggtttcaaaaaactggtgtataatgggatgagtgcccctgtgtttgcccattcagacagggttgtaggtcaatttctcagaatgaccaacccagaggaattgtccatctcttgtaaggacacgtcaagtttaagaatttgttatagatgtagggaggggagggaaaagatgaacagggctgactggctacagaacttctccttagtgacctagtcaacactgccaatgggtaagatcagagtgacttcatctggctcccaatgcttgagtacttgtccctctagttgccatattggggtcttcctattcagcaccccaaaaacacatttgcagataatattctctttcttcaaccaacacctggtatcagattctttcctgaaactgaaaaaggatgtcatgctattgttcacaatccatagagcagttctaaaccaggctttcataatcttagcacttatatacttctagcaattatctataaggaaatcaaagtatcaactttttgtttcctttttgtcttgggttctgaatatatgttatctttcgagagtttttttcttcaaagatatttcatggtagttctaagctctctgtgaatgaaattgtaagtacagattcccacacaatattcaattttcttatttgactaaggtttgtctttccagtttctgaaggtcattttacttccttacaagtttggcagttgtaaacaaaactactatgtatgtctatgtgtaagttttaatatgagtgtaattccttaatttatttgtgtaaataagagtacaaactgatgagttgtatggtctaagtatgtttaatgttgtaagagagaaaccattaactctcttgcaaaggggcctcccatttcatgttttacaagcaaggaatctgttcctattgctctgtgtcctcattgggagtttccttgttggttggccactatgattgtgtgtgtgtgtgtgtgtgtgtgtgtgtgtgtgtcatactgcatcttttcaggctttccctggtagtatgttaccttgagtatcttttcactcacttgcttgcagggcttgttttccttaatcagtgcctgtccatgcctgttgctcatattttaaattgagttcattctgattttactgctgagcaatacaagccatgttttgggtcagtcattgttcaaacatggttttgtagagatttgcttgacgtatgcagcttttctcagtcctttaacattgtttttcacaagtaggaacttttaatcataatatcagttataggtttcatggattatgactttggtctgtgtttactagagtggttgtttctgggaggggtgcaggctaaggtcaggatgtactatatgagagaagaataaataaaaagaagaaagaaaaaagaaaaagaagaagaaaaaagtaccatacctaaagtcatctagcttttgttttgtttatttcattttgtattttgaacatcagcaaatcctaatctgtaaaacctactacagtagtgtttctcaccttcctaatgctgtgaccttttaatatatctcttcatgtgtgataacgcccaaccatattttcattgctacttcataactgtaattttgccactgttatgaattgtagtgtaaatatctgttttctcatagtcttaagtgacccttgtgacagagtcattcaagcccaaaggggttgagaagcactatgctacgtcatcttttattttattcagagtttttatgtactatacatgttccccctttcataaacaactaagagtaagttatgataagttcatgcttctttcagatgacttcaagtctcctccattggcagcaggcatttgtggtggtttgaatgaggatgacccactcaggctgatatatttgcatgctaaattcccattgaagttattgtaaggattaggaggcgtggtcttgttggaagaggtgtgtcactgagggtgggctttgagatttcaaaaggccatgccagtctcagtctttctctctgtgtctctccatcactctctatctcttcttctctatctctctacctctctctttccctcccttcccactcccctcctctctgtcttcctgcctaaccctgcctgtggatcaggttgcaaagccctcagctactactccagttccatatgtgctcacagccatgataacaaatgaactaaccctctgaaactgtaagcaagctgccaattaaatgtcttcttttgcaagacttgcctttgtcatggtatcttttcacagctatagaacagcaactaagaaaatattaaagaataaaacattatagtggaatccaaactgttcacaagatgccatcctttgttaatctcctatcctgagcatattttatatagttactttagaagttagctgttgtgtgttcttgatcacactacatagtgaacgaatggacagcattccagtgaaagatcacatgtccaagagtacttagatatcacagattggccttgagaagtctttttaaagaaggatctaaggttgagtgggtagggaaagagggctggatctgggatgagctagcagagaaaagatgaatatcatcaaaacacgttgtatgaatttagagggttaatttgatcaaaacatggcatatataactctcaaaggataaacaaattttttaaaaatgcataaaacaatcctgcctacctatagcttatcataggaggaaggtgggtctgccacacaagtggaagaaaaaaaaggtgagcaggaaataatattttataacatgacacttgagaattgtccaaaaccaggaaaaataaaatgtatcaaaccactgagtccagaatctctgagaagcaagaaagataattacaaaagtaaacagaacatacacatatgtctcattaaaaatgaagaggaaataattaaatcagtcaaggaaaaaagataacgcatactggacagtaacactaataaagatctgcggaagtggctctcagctccctaatgctgtgatcctttaatacagctgctcacgttatggtgaccccccaaccataaagtttttcattgttacttcataactgtaattttgttattgttatgaatcataatatagatataccatatggaggatatctgatatgtgacccccaaaggtggagatctgtgggtttactctatagaaccactgttctatagggtaaactgagtacagtggcatatgtttgtaatcccagtgcaggggaggcagagacaggtagagccctgagatttgatgacttgactgcttggcaagtcccagaccagtgagaaagcctgtctcaaagtgaaagcagacagtgcctaagtaactatatcaggcatccaacatcatcctctgccatcaatatgcacagggcccaacatacaaaaaagttaaagtgtgcttttcagaaattctgtgagaagataatgaaatgcatggtagttcagacagatgataatgctctctcctccaatgctcttactgaaatagctaccatggatctttaatagctatatgtcgttggctttgttttgttttgttttgttttgtttatgagatggggtctcactgtgtagccctgtctggcctgtaacttgttatatatatcaagctggtcttgcatttacagagatccaacatacaagtgggattcaaggtatgtgtcaaaagacccaagctggtagttatttataatgtattnnnnnnnnnnnnnnnnnnnnnnnnnnnnnnnnnnnnnnnnnnnnnnnnnnnnnnnnnnnnnnnnnnnnnnnnnnnnnnnnnnnnnnnnnnnnnnnnnnnnnnnnnnnnnnnnnnnnnnnnnnnnnnnnnnnnnnnnnnnnnnnnnnnnnnnnnnnnnnnnnnnnnnnnnnnnnnnnnnnnnnnnnnnnnnnnnnnnnnnnnnnnnnnnnnnnnnnnnnnnnnnnnnnnnnnnnnnnnnnnnnnnnnnnnnnnnnnnnnnnnnnnnnnnnnnnnnnnnnnnnnnnnnnnnnnnnnnnnnnnnnnnnnnnnnnnnnnnnnnnnnnnnnnnnnnnnnnnnnnnnnnnnnnnnnnnnnnnnnnnnnnnnnnnnnnnnnnnnnnnnnnnnnnnnnnnnnnnnnnnnnnnnnnnnnnnnnnnnnnnnnnnnnnnnnnnnnnnnnnnnnnnnnnnnnnnnnnnnnnnnnnnnnnnnnnnnnnnnnnnnnnnnnnnnnnnnnnnnnnnnnnnnnnnnnnnnnnnnnnnnnnnnnnnnnnnnnnnnnnnnnnnnnnnnnnnnnnnnnnnnnnnnnnnnnnnnnnnnnnnnnnnnnnnnnnnnnnnnnnnnnnnnnnnnnnnnnnnnnnnnnnnnnnnnnnnnnnnnnnnnnnnnnnnnnnnnnnnnnnnnnnnnnnnnnnnnnnnnnnnnnnnnnnnnnnnnnnnnnnnnnnnnnnnnnnnnnnnnnnnnnnnnnnnnnnnnnnnnnnnnnnnnnnnnnnnnnnnnnnnnnnnnnnnnnnnnnnnnnnnnnnnnnnnnnnnnnnnnnnnnnnnnnnnnnnnnnnnnnnnnnnnnnnnnnnnnnnnnnnnnnnnnnnnnnnnnnnnnnnnnnnnnnnnnnnnnnnnnnnnnnnnnnnnnnnnnnnnnnnnnnnnnnnnnnnnnnnnnnnnnnnnnnnnnnnnnnnnnnnnnnnnnnnnnnnnnnnnnnnnnnnnnnnnnnnnnnnnnnnnnnnnnnnnnnnnnnnnnnnnnnnnnnnnnnnnnnnnnnnnnnnnnnnnnnnnnnnnnnnnnnnnnnnnnnnnnnnnnnnnnnnnnnnnnnnnnnnnnnnnnnnnnnnnnnnnnnnnnnnnnnnnnnnnnnnnnnnnnnnnnnnnnnnnnnnnnnnnnnnnnnnnnnnnnnnnnnnnnnnnnnnnnnnnnnnnnnnnnnnnnnnnnnnnnnnnnnnnnnnnnnnnnnnnnnnnnnnnnnnnnnnnnnnnnnnnnnnnnnnnnnnnnnnnnnnnnnnnnnnnnnnnnnnnnnnnnnnnnnnnnnnnnnnnnnnnnnnnnnnnnnnnnnnnnnnnnnnnnnnnnnnnnnnnnnnnnnnnnnnnnnnnnnnnnnnnnnnnnctctctctctctctctctctctctctctctctctctctctctctctctctctgtgtatgtgtgtgtgtgttatatgtgtgcttgtatacacgtgtacacaggtacatgagagcaagagcaaaggtcaatgtcttctataactctttgctgtgttcttttgtttgtctttggttttgtttagacaccgatccctcatcggcctggagctcgtggtatagctagactggctggacagtgagtcccagggatccccctgactcagtgtccctgccagctctgcaattatggttgcactaccactggggatcaaacctaggtgatcatcttacacagcaagcacttgattcactgagacacttccaacctcaacggtggccattagtagcaataaatatactaatccaatgtaaggtattaatgatgaggaaattggagggggaactcttttgtactatcattatggttttcccataaacctaaatgtctctaaaagattcttttctaatgcaattaaggtaaaattttattaatgtcacaatttatatatcagatttatcactaacagaacagaacatcagtacatcttctgtgttgaaaataaaatatgagggttggtgatgtagttcagcatgagtgaggcttcaaattcaaccttcagcccagcaagaacaaacagaacaaagacaagatccacacccatctaaatatcaaagcaaaatagaattaacactttggttttctctaagaagcttttgtttaaaaaaaaaaagtggtgttcaatttttgagaatacaaactagcaaaaaaaaattctcccatctgtaaataatgtcttgccaaataatgtgctttgtatcagataaatgaatgtgaaactctagcatacatttgtgatgtgacaattaggtatgtaattatttggcaggatacattttcatgtctgtaagcaaaaaattaaatatgcaatataattccagggcaaacagttttcaacattgcttatgagtagcccttcctacttctccacccttataattactacagatcatcaaaattgaagtttggcaagtcgaagacagtagctgaaaacgtaagagcccggggccgactctgcaatacttggcagaaggactgggggtgagggagaagaaagcaatattctcccagaagtcagactcaggaagagtgctgtattcattcaggtgacccaaagtctggagtgtcagataacataggtcaacttattccaaagaatcaaagatcaccaccagagtcctcagaaaagaactccgcatcctgcttacatctgtctttttggcttctctttgcttcgcacggcttttatcaccacctggggggcaagccaaacaggcaagggcgcctttcccaccactaagtcattcataaattatgtgttttctgagtcaagaagacgcttatgatttcaaatgattgcttggctttttccccaataaaattcagtcatttattatatatttcttcttcatctcaaatacgattttaaaatataaactgatttttgtaatccatgaacatcgtctttttgttttatcttcttgtctcttcttatatgtcaacctgtcagaaaacttttgtacttactttgagcatatttcaacttaaaaaaaaagaaggttgaagttgtaaatgcacaacacttagttctttaattagtaggcaaggtatttgccaagtgcacactattgtgcctttaggttgtatgtcctacactagcagagcacaccagacaaacttttctttctaaaatgatttcaaaacaatttcatttcaaatgatacaaaaaagcccaaaatattgtttaggaaacaaaattttttagtttaattgttacatagatactatttatacctggtaattattttgaacaagtcgtaagtacaaataaatatgaatgaaaatgagaaatagtgttttattatgtatatatgtgtatacatatgtatatgtgtatacaaatacatattctatattttctttctccattcatccacttgctcactggtatacacttgtacggcttccatttctgggctataatgaatactgctggaggtagcatagattagcatctctctgaggtggcaccttcagttcctctggatgtacactgataagtgggattactagtttatatagtcattctttttaggaattcaaaggttccttggctcaaaaggagattattgttaagctaaattatttcagccaaattcttagcacatgcttcgtcagtactgtacactctgctcattccaaagccccaaaggtaagggtggaatttgcgactaagtgcttagggagttttatataatctgttagaacacttttatatattagaactaacaatactatgcctgggcttctggtttgtatgtctttttaaactttcattcttactgatttatgttatattttgcaaaatattgatatataagcttagcattttcaaaaaatattttaaatgggtacttcacagaagcctaccactgtctttcctatttctcagcaaagaaattaaacttgcagtggtaaagtaattgctcagttttcaaccccaaaattcctgttgtcagtgcccattcctgacatcctttctctatttccagtaacactgttgtcatggacactgagtcctgcatttcattgcatggcacgttttgtcttctaggatcatcaaggaaattatgagttgtacccaaacaccattttcctttataggcaaattatgaactcgctgtccgtggtttcttttatgcactttccttattctcctgcacattcttaatctcttgtatctacacaataataagtaatgtttgctttctttccattatgtataaatgtaaagcctactgctgcctgacttcaccactacgcagatcttttgcacatggtttgatataagatatggaggtttgcctctctttttttagctttttattttgaagtagctttaaattcattataattaaacactcaaaaatgtttacaagaaaataattacaaactgaccacaaaaaaagcttccacccctttgaaatggagtatttctctgcaatgttctctaatggtaatgtgataaaatcagaaataagtagacagactctcagttttctcagataactaaaattctagttatgttttcctgggaaccctgtttaaagggtagtatgcaggtataaatgcattcattgagccagataaagattgaaaacaacctgcttgtccttcacatgaaaaatgtctgttatgtaatagaagaaattcaatgtgtgttaagcagcatcatcaaggataaagctaacgcaattcaggagaaagaagagggcaggagagaggatgagaaaatcaggagggcttctttattatagaagatgggtggggtttgttataagatatagtgagatatcttcaaggctaagagtagacagtgatcaaagggaccattgtggaaatctacattttttaggttttatttttaagtgtgtgtgtgtgtgtgtgtgtgtgtgtgtgtgtgtctgtgtgtctgtgtgtctgtgtgtctgtgtctgtgtgtctgtgtgtctgtgcgtgtgggcatgtgcatctgagtgtaggtgcccacggtggtcagtgacattggatcccctgaagcaatgattgtaagccaccctgtgtggttgctgggaccaagcttggggttttcagatccagacctgaatactctacaaggacacgaaatatgtataactactgagtcatttctccaaacccaaccaacctacataaaagcggttttatgctttatcttcttcatacatacatattgtttctatttgacctagattcattgtacatgggcctgaatttcataaaaaagttttatgcaagtatacaatgtaatttgatggtatttcttcccccctccttcccttcgttgctgttcccaggcctgctacattcttttattcacctagacaggctcacttatacttccatgttgtggatacctatataattttgtgtgtcaatacaaaatctagaacccacaaatgagaaaagacatgtatctacctgagactgactttcttccctttacataattatctctagttttacacactttcctgtaaacattatcatttcattcttatttatggctgaaaattatcccatagttcatattactacatttgctttgcatctgtttgcagggagaagaggaagccctgagagagtgtgcattgttgactgagacacagccatgtcaaagaacccagagcctgaggccacgaggaatggaaaagcctccccactgggaggctcagaggcatagaaaaggctttccctggtccatcttcggatgctaacagtgtgtgcagaaaatgtctaccatgactgtttacccagatcttttggaatgcttaggtttctccatcagagagcccaatacaatctatcccaggtctacttctctctctctctctctctctctctctctctctctctctctctctctctctctctctctcgcgcgcgcgcgcgctctctctgtgtgtgtgtgtgtgtgtgtgtgtgtgtgtgtctgtctgtctgtctgtctgtctgtctgtctgtctgtctctttttctcattccttcactggctcagtcagattctagtcctcagaggccatgcagggacttaccactagtcctctgtggatggacacctagaatgcttctgtctcggttattgtaaatagtgctccggtaaagatggatgagcaagtgtctctgtgatgctgacttggagtcctctgggctccaaggatacccaaggatcctaggagagggatattttataaaatcattaaccatatggagttaacacttcatctttctgacaccatttaatcttgcttctctccccctgcctctctcttttggtttttcgggacagggtttctctgtgtaggtttggagcctatcctggcactcgctctggagaccaggctggcctcaaactcacagagatccgcctgcctctgcctcctgagtgctgggattaaaggcgtgcgcctcagatgctgggcttaaccttgcttatctcttaaaagctggtctctaaacactcacattgtggattagggctcaatcctatgaacttggagagtctccagcagagggatttctgctgctttgcctgtggaatgcttgcttatttgtagcaggagtcaaaagatgagtgaaagccagtggtttggagcactatgcatcctctccgagttgggagacacaggaagccacttgacgggagactaaggcaggcagaaatcaaagagcacgtgtcccaaagaaaaagaagttttctcatgtaaatcagttgttttccactccagttcctgatatggaaaattagcattttaagtctctattgtcatcatagatttataacatatttgctaaaagccatcagcaatattaataatcatgagacgccaataatcattgttcctgagtcaaaattttttctttaacaatattacttttctaatttaacttttgttttcccttgagaaacaagtgtgctgtttctcatttgcctggttttattataagtgccaggtttatttagccaagtgctccaatgtatttatctaagatctatgaagatggtttcaaaataggcaaacaggtgatgtactgttttcattcttttttttttctttgaagttcctcttcacatagccctctgaactacttggttttgttttcctggtaataccaggccaattaatctgatgattgaggcagttaatcaacagacaggtagtacatacagcgtgaacacactggacagagtgacagtccactttctaggtgagacaggccagaatggtacaggagttcaacacattactcagaaaataagcaattaaaaacttaattgtttatttctggaaataatattcaccacttactcctagggacagtacatctgcctgagttctcttgtcatgtgggtcatactagaaacactgtctcgctgaaactcaggtatgtgggaaaatgtgtggaatatgtgtacactcctcccaatttgctgtaaacttaaaaatgctttgaaaaaatggtttcaaaaaattatccttgaacatagaataaaggaatacttttaaaagactgactaaaaacttgaacaaaaaaaaactaaatgtaaaagtcgggccctgatgacacaagcctttgatcccagcacttagaaggcagaggcaggtggatctctgagtttgaggcccccctagtctatagagtgagttccaggacagccacagctacacagggaaactctgtctcaaaaaaatataaataaatatttaaatatagtatacagtaataatttccttaatttcctgatttttgaaggacacatccccaaaatagataacatattttcagtgtagccaaactacttataaattgtcacaggcaaatttgggcataggcttgatgtagatatcaatctctgctttcacagatcgcaggttttgcttgatgtcatgctcatgagatgttgcatataactctcatttgttcattgtaattgtatatggcataatacaataacttgaaattctgtttttgaagattttgtatttgtgtgtaactatatatgtatgcatgggtgtgtgtgtgtgtgtgtgtgtgtgtgtgtgtgtgtgtgggtgtgtgtggggtgacacaggaggccagaagcgggcctcagttaccctcctctatcatttaatcatgtattcttttgaggcaaggtctctttctgaagctggagctcgtgttttgtcacaaagctggaagccagaaagtcccagtgattctcccatatctgctcctctcagagctggggatacaggcatgcaccaaatgctcgactcattacatggatgctgccatctgaactctacgcctttatgattgttaagtaagcacctttaaccactgagccatttctccaccccctcataatctcattttttcctaatctatttaatgagtggttttatgtggtttttttcatttcccccattacatcaacactactgtaaacattcctgtccatgtgtttctgaggtctacacaaaaatggtatgtgtataaaaacatggtgaaactcatccattttatgctaactaaattttttaattaaattgaaaaatctgtgaagtaagacttattttctcaatgtgagcagttagaaaattaaaaatatgcaggcgacaatatgggggcctttagagcagaaccatctctgattgactcagagagcaatgctctctacactgctgctctccaaattacagcacaaggaggactcccctgagagtgacttcaggtgtgaaataagactaccggtggtcacagaacaacatagccaggtactgcaaccagcagcctgaggagcccttttacccctcaggcaaaaccacatcctgaactatatgcaaaaaagaactttactactaggcaagtgttccaaaattgatgaagtttattannnnnnnnnnacaaggtttttccctgcaagttaaactgttagaccaactcctttaggagttgtgcccatctaacttgggcactgaagctacactttcttcatgcaataaggagaaagtgttccatctgtaacactccctccctagaaaggaattacctttttcttatgcaactggtagacttcactctctgaactatcctcttggaattctttttaacaggtacatttttttcccaaatgagagagaattctcatttctctctctttttattaggataagtacactctcctatgtcttccttagtcactcttaatagtctattaaaaatcattcatttataagattttgtgtttttgataaaacatatatcagattctctcacacttttaatatcttaccatatctgaggatgcaccatatttcctcattttttttgtttttgtttttgttgttgttttttttaatgagactaactttccatttttttattattattattaattcaagttgaggaacaggcttgtttcacatgtaagtcccctctccctctccctctccctcccctcacccccatccctcctctcccacctccaacctaccccccaccccannnnnnnnnnnnnnnnnnnnnnnnnnnnnnnnnnnnnnnnnnnnnnnnnnnnnnnnnnnnnnnnnnnnnnnnnnnnnnnnnnnnnnnnnnnnnnnnnnnnnnnnnnnnnnnnnnnnnnnnnnnnnnnnnnnnnnnnnnnnnnnnnnnnnnnnnnnnnnnnnnnnnnnnnnnnnnnnnnnnnnnnnnnnnnnnnnnnnnnnnnnnnnnnnnnnnnnnnnnnnnnnnnnnnnnnnnnnnnnnnnnnnnnnnnnnnnnnnnnnnnnnnnnnnnnnnnnnnnnnnnnnnnnnnnnnnnnnnnnnnnnnnnnnnnnnnnnnnnnnnnnnnnnnnnnnnnnnnnnnnnnnnnnnnnnnnnnnnnnnnnnnnnnnnnnnnnnnnnnnnnnnnnnnnnnnnnnnnnnnnnnnnnnnnnnnnnnnnnnnnnnnnnnnnnnnnnnnnnnnnnnnnnnnnnnnnnnnnnnnnnnnnnnnnnnnnnnnnnnnnnnnnnnnnnnnnnnnnnnnnnnnnnnnnnnnnnnnnnnnnnnnnnnnnnnnnnnnnnnnnnnnnnnnnnnnnnnnnnnnnnnnnnnnnnnnnnnnnnnnnnnnnnnnnnnnnnnnnnnnnnnnnnnnnnnnnnnnnnnnnnnnnnnnnnnnnnnnnnnnnnnnnnnnnnnnnnnnnnnnnnnnnnnnnnnnnnnnnnnnnnnnnnnnnnnnnnnnnnnnnnnnnnnnnnnnnnnnnnnnnnnnnnnnnnnnnnnnnnnnnnnnnnnnnnnnnnnnnnnnnnnnnnnnnnnnnnnnnnnnnnnnnnnnnnnnnnnnnnnnnnnnnnnnnnnnnnnnnnnnnnnnnnnnnnnnnnnnnnnnnnnnnnnnnnnnnnnnnnnnnnnnnnnnnnnnnnnnnnnnnnnnnnnnnnnnnnnnnnnnnnnnnnnnnnnnnnnnnnnnnnnnnnnnnnnnnnnnnnnnnnnnnnnngtggcagcaccctctcccctaccctcatgctctcaattagctcgggagttcatgccacttcccattcctggggtccatttatcccttagagtccttcatgtttcctagtttctttggtgaagaggattataggctggtaaacctttgctctatgtctaaaattcatatatgagtgagtacataccatgtttgtctttttgtaattcatatttcctcatttttgttgggtcttttgcccacttatttctttgtatagtttactaaacattttaattgttatattgattatttcaaggaacaaatcttggatgttttattcttaacacatatattacatttagtttacttttatatggcaaatgcacgatttctactttttctactcccctttacttacatttgttttccttttaccaagttcttgagataaattctttgtccatttattttcaatcttctatctcctatttgatgcatctagatccataaagtttcttaagtacggtgttggctatatcccacaagcttaatacatgagccactttctcttttcatttctaaattatttatagctgaaactttattccatcttcagagtgttttaagattttgaaaagaactacattttgttattgctagtatcatttgcattgtgtaaaaaatatatccattatcatctcaagtttggaaaaaaattattttactttaatttgttttataatacatggcaaatttatgtgatgttctatgtattttggaatcattgtgtatgttgtcatcatttaagtatctaatatatcagtcacaataattattatttgaatattgtactttcttgttttagagtttcataatctattgagttcttgaaggcatccctttttggtcctaacattttactttcttcaataaaatataagtagtgtcagaattgcttgttcactctgagtcccaggttcttcttgttgattacttgtattatatatatatatatatatctatatatatatatatatatatatatatattatttcatataagaactgtccacaaaataccacaaagctgaagaaaaagggaagtagataccagatggggcatgatgctatctactgagaactcactgaaaaagatctatcagcgttgtcaacaacctttatttgaaaattcatgacttgggtctgaggaggaggcttctgttgcggtcaggatacaagtgactgttatccaggcgagaatatagcctgttcatctcacactgacattgaagacactgggcactctactggagctgatggcactgtggtccatttgtaaagctccatggaatgttgagaaagtgttggggaagcaagccagtacttagggccagtcaaggccattacattaccccagtagagaaggctctttcagcaccttaaacttctgtgtgtttggagatatacgggctgtacctctacagccaatggactgactcatccaagcaagacctgatgggggatgtctttgtatatatatgtttctcttattggttgataaataaaacactgattggccagtagccaggcaggaagtataggtggggctaccagatgaggtgaatgttgggaagaggatgcagagagaagcagccagagagataatatgtaggcagttgggaagataggacaccgggtattctctggtaagataaggccatgtagaaatacacagattagtagttatgagttaataattaagagagagcaagccagtaagtagcctaagccattgaccaaacagtttctaattaatataagcctctgtgtgtttatttggggctgaagctgctgtgggaccagatgggatagagacaccattctacaaacaccattccagactaagcagttccttaatgtcaaagactttatctctatcatcatagtcaccagagcccagagttctaaggccgtgctgagtgaagttaaagacttcctagaattcaatgagaatgaagagacaacacacccacacttatgggatactttgaaagcagtgctaagaggaaagttcatatcactaaatgcccacatgaggaaactagagaatagtcacactagaaaattgacagcacaactgaaagatctacaacaaaaagaagcaaactcaccccgaaggagtagatgccaggacataatcaaattgagggttgaaatcaataaagtagactaggaaaacaatacaaagaaccaatgtaacaaagagttaattctttgagaaaatcaacaagatacacaaacctttatccaaacttaccaaacagcagagagtgaacatataaattaacaaaatcaaaaatgaaaagggggacataacaagggacagaaatccagagaatcttcaggtcattctttgaaaacctgtactcctcaaaattcaaaaatctaaaggaaatggacaccaattctcctcaaagtattccacacaatagaagcagaagggtcattgccaaactctttttaggaggctccaattaccttgatacccaagccacacaaagacacaactaagaaagagagctacagaccaatatccctcataaacattgatgcaaaaataatcaataaaatactggcaaattgaattcaaggtcacatcagaagagtcatccaccatgatcaagtaggcttcatcccagggatgcagggatggttcaacatatgaaaatccatcaatttaatccaccatataaacaaactgagaaataaaaatcacatgatcatctcactaggtgctgaaaaagcctttgacaaaatctaacactccttcatgataaaagtcgtggagagatcggggataacaggaacatacctcaacataataaaagcaatatacagcaaaccaacagccaacatcaaaataaatggagagaaactcaactggattcctctaaaatcaggaacaagaaaaagttgtccactctctccatgcctcttcaatattgtgcttgaagttctagctggagcaataagacaacaaaaggagatcaagggcatacaaattggaaaggcagaagtcaaactttcactatttgcagatgatatgatagtttatataagcaacccgggaaaaaatctaccaggaactcctacagctgataaacaccttcagctaagtggcaggatacaagattaactcagaaaaatcagtagccctaatatatacagaagataaatgggctgagaaagaaatcagaagaacatcaccctttacaattgccacaaacaacataaaataccttgggatgatgctaatcaaacaagacctgtatggcaagaactttgagtcttttaagaaagaaattaaagaagataccagaaaatggaaagatctcccatgctcttggataggtaggatcaacatagtaaaaatggcaatcttgccaaaagcaatctacagattcagtgcaatccccatcaaaatcccagcacaattcttcacaaaccttgaaagaacaaatctcaactttatatggtaaaataaaagacacaggatagccaaaaacaaccatgtacaataaaggaacttttcaaggcatcaccatccctgacttcaagctctattatagagctatagctgaaaacatcttggtattggcacaaaaataaacaggttgaccaatggaattgaattgaaacccctgctattaacccacacatctaagaacacctgatttttgacgaagaagctaaaatcatggaaaaaagaaagcatattcaacaaatggtgctactataactggctgttgtcatgtagaagactgcagatagatccgtatctatcgacaagcacaaaacttaagcccaaatggatcaaagacctcaacataaatccagccacactgaacctcttatatgagaaagtaaagataaagcaccctcaaacaattggtacaggagaccactttctgaagataacacaggtagcacagacactgatattgacaattgataaataggacctcctgaaactgagaagcttctgtaagacaaaggagacagtcaacaagacaaatggcagcccacagaatgggaaaagatattcaccaaccacacatctgacagagggatgatctccaaaatatacaaagaactcaagaagctagtcaccaagacaccaaataatccaattaaaaagtggggtatagaactaaatagagaattctcgatggatgaatctaaaatggctgaaagacacataagaacgtgctcgacatccttagccatcggggaaatgcaaatcaaaacaactctgagataccatcttactcctgtcaaaatggctaaaatcaaaaacacaaaggacagtttatgctggagaagacatggagaaaggggaactctcctccactgctggtgggattgccaactcgtacaaccactttggaaatcagtatggcggttcctcaggaaaactggaaacagtctaacacaagatccagcaattccactcttaggcataaatccaaagaatgcacatgcatacaacaaggacatctgttcaactatgttcatagcagcattatttgtaatagccagaacctggaagcaacatagatgcccctaaactgaagaatggatggagaaaatatgttacatttacacaatggagtactactcagcagaaaggggaaaaaaaatggaatcttgaaatttgcaggcaaatggatggaactagaagaaaccatcctgagtgaggtaacccagccacaaaaagacaaaaatggtatgaactcactcatatacagattttagacataaagcaaaggattaccagcctacaatctacaccacccgagaagctaggaaacaaggaggaccctaagagagacatacatggtcctccagagaagggttaagggacatgatctcctgagcaaattgggagcatgggggaagggagaaggagttagaagaaagagaaggggagaagaggggggtagaggaagacatgagacagcaggaagattgagtcaggggaaaaataaaggaaagagataccatgatagagggagcctttataggtttaaagagaaatctagcactagataattatccagagacctacaaggttgaccccaactaacaatctttgcaatagtcgagaggccaccttaaatgcccttcccgatgagactgatgactaccttatatgccatcctagaatctttatccagtagctgatggaagcagaagcagtcacccacagctaaacactgagctgaactctggaatccagttgcagagagggaggagtgataagcaaaggggtcaagaccaggctggagaaacccacagaaacatctagagttctgaacaaggagaagctcatggagcctagactgattgctgggaaaccaacatggactgttccagacctcctgaacatggatgtcagtttggaggactggttaatttgtgggccctctggtagtggatcagtatttatccctagtacacaaatggactttgggagcccattccacacagaaggatactctctcagtctaaacacagaggggagggtctaggccctgctccaaatgatatgacagactttgaagatccgccttagaaggcttcaccctccctggggagcagaaaggggatggggagaggtgggggacagaggaggaggggagggagagggaattggggttgatatgtaaaacaaggttgtttctaatttaaattaaaaacaaattttacttcacaaaaaaaaaagagcctggtttcatttctaaaccagatgtattttacagggacagaggacctatcttgcaggggaacctgtagccaggcatagtcagggtgacgtagagtaagaggttcagggctgcgtttcacttttgctacgccccctgtccccattgttgtcacttaggatagtgtatgtacctagttagggatagcttcctattgtttatggttgggattggaaggaggtgttcaggggtagacacctctttcagatgactttaggatttagttaaaatagatagttaggatgtgacataagcagattgttgtatcttcttatatttcacttttatgattgttcattttggatactttacagtgttaagttttaatcctcttttagactaaaaggggaattgtaggggaacctgtagccacgcctgcttagtggcgtggtcagggtgatgtagagtaagaggttcagggctgcatttcactttagtttccctttcagcttgctgtacagactgctgccatggcggctggctaggtcactctgtaagtaaggcttttccctgttaaatacccttatatttcttggctccgtattggtaatttcccactatactatctaattttttttaatatctgaactatgaaagctgaccttatcaaaatagaaacaaatattccattatgattacataactgtgtatgtgggaccatggaaaaagctcctagtgtccatgtctttcagaggtttggagcttgaaatgccccaatctaagtgtggctgacatgtgttgtttatccaggtagatcaggaagtgactgagttggttggagctgttggtatttactgaatgtaaagaagtgttcgtagcagatctgcctggttttcttggcctcctcttctgcttttcttgtcttctgatctcacacctaaaatgcagattcttttcccaacacaagtattaaagaggagcatcccactttgctttttgttttgtttttcaatctttgctttccaaaagctaaaagcagctttctcatccacacagcccagacgtcctttcagggtctaggacaaactgatgcaaacaaagccttatggatatgcactttggaagtgctccaagctttcccaatgtccaacccacacaggtccagggatgtgtgtgtcctatccataaggatgttggactttgcataaggcgtgtcttcagaagcaaagcttactctactctggaaagcgtatgtaggcacctctgcttcacccgctgtagtcttatcttcattatcggtgcgaaagcccacagagcaacgttttctcaataatgttgaccatgtagggcctcaaaagggtgtcagtgaccctgagaggttcacagatcatgccctacctacaactaagggacttctagaatgcaatctaggcacatctagaacgccatccaggcaggctgggaatcgtcactgtgatgaacaggacacctgagtgaggatcactgtccttgattctgtgtttccttcctcagtagtccatgaaaaatgtgtattcaggagagctcttcctctcaaagggaggatgtctctgagagttccccacagggtttgaggctactgtctaggaaagacaggatgcatccacagtggttcgatctcagaaacaaagaaaaagcaaaacaaaaccatggaaccaaaagcaaaagaaccatggaacactgcagtttgtgctcagttatcagccctacagaaattcttagaacctaaaacaacaacaacaatttaaagaacttaaaactcaatgtaacaaatttggaggtgggtaagaaaaagaagaaaaaaaatttaatacaactatttcactttcagcaaaaaaaaagggaagaaaatattaggcctttgctttctaaatttaagtgtatatttgggggtctaagttacttcaggaaacaatttctctattaatatgtatgaaaagaaatttatagcagctatcatgaaatacaaagcaaccaggaataaattcatttaataaaagaaattgagtgtgctgtatatatccctagatgttccatttaaaatatttcaccaacttaatctagttacctagtagtaaggcaattacacactgaagatttagagtcgatacagatttagggttcagttgtgatcttggaggcttctcacaaaacacttcttacgggaaagcaagccccttggcaacctttgcatcattgtgttcaattaagtgacaatttattctgtttttgtttgtaatggggctcgtcatttactgtcattactggtccaccagagagtattctctttgcttttctcttcagaataaatctgagccatcgagagtttactcttctcagcagtgagaaagcttgtgactaatgggaagccagctccatctagctgtccatcttgtgctattcctctggccacatccaccagaggaatatcttgtgtcatcaaagtccagcttttctaaattagtcccttgccaaatgcagaggtctgtgacttcgtgtctgaaaactttcaaaggggttggtgctcattcacttatttctgttgtattttccccttttgttcctccaacatgaagctggttattctaaggaaagagcctaacattttaggcaggttaacaggtaacctgattaagtgttgaaatcgtattatatgtgagattgtttattgtgtgcatgtgggtctttatcaaaaaaatgctaagcaggtctcctgagacttccaaagaagtgctctccagtctctcttgctgaaatcaatctaaaaatatttagcatgtggaaatggtgtgtagccacatgcatctttattagactgtgccaatattaaagagatttacagaaaaaaacaatgcttgttgcacacatttcctacattgttgttattaaattattcttaaatttgtaaaattactaagctctctaatccatgcttctgagcgagttaggaattgcactgtcaccacagttttatcactaaagagatatgctaacatctttataaattcactaaaatcacctttcacttcaaagagctctacatacatttcaaaacatgtggtttttaacacattttcagtgcatttccatcaatatttcattttgctatcacccagctttgcctctcatcacaaacagtaaagcagcgggccagtcaggcagttaaacatagcttgggttggggaagcacattacgctatgttcttcattcaaatagtaaaatatgctctgagggacaaaggactatctgtaaacacaaatatggttttataaacccttcagactctaaaaaacagggtacatacatcagatgtgatttctcagattgtgccatgtcctatctggctcacaatcctgcatttgtactggtagcaatcatacccatgaaacataaaaacgtcatgtgtggagatctcctgaagctccctgtctgtacaggttgggcactggccatgatgcactcattcatccatccactcaatacaattttgcaaatctactgcaaacacatagttctacagtgagctatgtccttagacccttaagagaaaacatgtcctcagatttcccacccacaagcattatagagacaatgtaaagaatgataaattggctttacttttctaaatataatcaattctctttgtggttaaagcacatgccttttcttaaaagccattgacatccaccaatactacagcatgattttgatcatcaggaaaactggcagaaagaggtgcactgaagaaagagtcagggcttctagcaatcagaagtgagacgcagcaccatacaacatgaaggacaacgaggagcttggagtgagcactcaacaactgcagagagctcgtaccaggagtcgggtgaggcacgtctgctggctcccagcaccaccaccactagtgtgtagccatgagcaacacgcagttgctaactttcttttgcttcacaggcaaactgaaaatggtaaaaagaaaaccactaaaatatataaattctgtaagcttgaggtcttgacagtctcaaacttgcctaggacaaggatatgccccaacttagctccaaaaccaaatcatattttggtcaaacacacaaaaggaaagctttctaggccattctggctgcaggatacattcaccaaatacacaccagatatcccccaattgatctgaatctctggcctgcttgtcaatctctggtcaaacttgttcaagatgggcaggatgcccccaaactcatgcttctcttccttcttttctaataacatactttatgttgataaatgcagaatgactagccaaacctccatgtttgaaacccttttgcctcatctgtttcacaagctcccaaaactggccagcaccactctccacagagacacgtatcataaagcagaaactaatcttcacttatatttgtgaagtgagcattttcaagacacgtatgactgtcaacttttgtctgtaagttaaatcactttgcttttaattcgctgtaatcctttactaatccataaacaaagcctcgttaatcatctctaaaattttcttttatttatttgttataattcccttctatatttgggtgactctgaggagataatttatgggtgatatttacttgatattacagaatggctttaaccctgcaataccaaaagggactctgctgctcaaatacaatcactagtccagtaggttggtggagcatggtaaatctaggcttcgtctcttcctctcatgcagaactagattttccttagacactaaggatctgatgagatggctcaggatttaagggcagtggctgctcttcagaagacacggttcattcccagcgctcgccggtcagcacacaaccacctgtaactccagctgcaggagaatccagtgccctcttctggtgtctgtgggcactgtacgtgcatagcgcacagataaacattcaggcaaagatataaaatcaaagtgttaaaggtgggttggggtgggttgggtagggaacatggggggatgggaaggtgagggaacgtcgggatggatatgtaaatatgagtaattaaaaataaataaataataaaaaagtctaagcaggcatggaggacagctacagctccaccccaggacatttgtcctgtgtaggcagagatcaataaccagctgcccattgccatgagacccgggaactaggaggacagctacacagctacaggtcggccccaagtagggcaccattatggtgagtgagtaaatggtgggggtggggacagaaaggttcctgtgttggggagaaggcagacacgaagcgtcaagagtcaagggcagtgaggaaccggatgatatgggtggcctgcttgctacctggggccaggtttgggctgttgccaagagccatgtctgggtctatggccctactgcattgatgtccatggttcctgttaccatcaaagacattgtggatagggctgcacagagttggttggccccacccctcactgacttcagtactaaggagaactggccctgctctacagcaactgtagtactgagaagagcaggccctggaccttgtctgggcagcccaatagagctgaccctattgacagaggctcagttgatctggtccatgaccatacacgagatatctagcctcctcatctgccatatagtggaatggaagagggagacatgtcctccccatccccctgcctctcaacacctatggtgggtggttgagttggccctgaggtcatgagagtgggagagctgattctgaccctcactggcttcagtgttcaggagaactagtcctgctccttgctgcctgctgcagtgggtgagctagccagggcaatgctggagagcttgcttggtggtgtcaatgatggaaagctggcaggataatcaacccagcaaccagccaggcccataaccaggggtatgagttggcccaccctaacatctatctacctcacattatgtataaacttctgggacatgtgaagggcctggacctgtagacacagcaggatctccatgacccaaggtaacattaggatatccaaaaggagtcccaatagggcccattactgagggtgtagcagaagccagagaccaatgactcattgcaatgaacacttacaggtaaagatacatggacaaagggtatactgtgtgactcactgtgtatatccatggctacagtttccatgctgagatttttctttctctttttctttctttctttctttctttctttcttcttcttttttgtatgttatagtttgtttttgttttgttgtattgtgctttggggggagttgttttgttttaaattttattttatttggggggggttacaggggcagttggtggatatgaagggacagggagatgaataggatcaggacacatgatgccaactccacaaagaatcaattttaaaaaagcctaagttgggcatggtggtacacaccttcaatctcagcacttggaacacagaggcaagtagatttccttgagttcaaggctaacctggtctacatagtgagttctaggacatataggactgtatagaacaaccctctctcaaaaaaatactattttttaaagattctaaagcagatgggagactatttgagaaagaggtcagtgcgagcatcaagggacaaagagtgatgggtaagtgagcataaacaaagtgtgttatctacattatgaaaatataataaccaaagtggctgttttatgcaattaatacacactaatgaaaataaattctcacacagcactcaccgtctgagaagcactgctctgtgtgacttaggaacataagtttgtcatgaagaaactaccttttagaaatataatgttgaaacttccattatcccctttgaaagataagtaatattaacaacaacaaagtctatcttcagttgctttgttgaatcgtgaacagaacagaaagcaaattagcatcgatagcattggctttcatttagattagaattacctcttctggtacttttacatattcatagcatcgtaacaattgatggtttttaaatttctcccaaaatcaatccagattatgaaacttgaatacttagttgtcaccaatttaataccactcgtgggaataaggtgtcattttcattacatttctatcttatattgatttttatctcatggtgagactcagacttggaatggttccaatctcctagggagatttcctcaaagacctatttaccccaatccctccagttttcatcccctgtggttctcatacttcacacaaaggcgatgcaatatacagggaaccaaaagacaatatcagtatcagagctaactgaaaatatatttgggaacaatgcaggcattctgtagccctggagccagggttcctctcacactctcagaactgaggtgagcctccctgtctagtgcctctcaggatctacctactccaaatgccaaagtgctaaagacagcaaggtaaagatgccagacaaaaaaaacagtgaggactccaactcatccggttcctaagctccttgaattgagccttaaggaaatagatctgcatggaagaaggaagagaggaagggttgggaagatctctgtggtagggcacttgcctgcagtgcataatcctgattcagtccctggnnnnnnnnnnnnnnnnnnnnnnnnnnnnnnnnnnnnnnnnnnnnnnnnnnnnnnnnnnnnnnnnnnnnnnnnnnnnnnnnnnnnnnnnnnnnnnnnnnnnnnnnnnnnnnnnnnnnnnnnnnnnnnnnnnnnnnnnnnnnnnnnnnnnnnnnnnntagagtctttaaaatcccatcttctactgtctagaaaacaggctgtaaacacagctgcccactctctcaagtggaacagtctgtgtcaaggcctagcgcctttagctgttatgtttgaaagccaaagaggaattttaatttaataagaatgaagcaccttaaagatacaacatgatcctccatttgagagattggatgatttgattagcaataaataacaaagaaaacaataagtaagcactgagaacctgaatattaattacctgtgttgttcactcttaaaaaggaaggaaattctgacacacattacaacgtttgcacaaatctccaggaattacactaattgacataagctatccacaaaagacaactgctgatggtttctcagctatcgtttctatgagtagttagattcatagaagcagaacacagatgggccattgccagaagttggagatgggaaaatgggatgctgtagagcaggcacagaagtccagttttacaagatgaaagtttcggagagtgggaacacggcactgtgaatacactcaacatgactggaatgaaaagatgggtatgaggaagacattatattcatgttatgtattttagtacaataaaaaatataaaaactactgcttttttaaaccaaccagtaatagcaccaatgattttcattcatttgacttccatattaaaggaagtgaaaatgaaacattttggacatagccctagtcaataagtacctcagatcaactgatcagcttaaattttcacaaaagccacaaacaattctcaataacaaacaatagagcatccaggtcaatatataatatgctttaaggttagtcgtggttgagaactgggaggaaaaataaccctctgataccagagacattgcttttggccacttccttaaaactagagagtttttacattcatgcacatttttgtcagatttggggctgagattattttttttcttttgttttgtttttcaaaagtgcctggaccccattactttatacctctattgtactgaaataaaaaaaactgatttgtttgattgtaaatacttagtagtgaataagaaaatcaacatttctgctgacaattctatctatactgtttgacccagtggaaatacacatctatgagatagtaaactttgaaagaattggtaatggaaagactgacagaatgtaagtatagtaagtagtaccatccaaatactttaagaacaagcaattgtgctgtgttgtcatatgatcatttataaataactaaatagcagaggaactaggggccatagctcagaataaagagcatgcatgaggctctgggtttgatctctaaaactgaaaataaataaataaataaataataaataaataaataaataataaatgataaataaattagtagaagttgaaaaagcatttctgttcaaagttattatggtgtatacactgcaggcattttcaaagaagcagcggcatttctgtgtcattggacagagtccacccacatgggagcacctgcaatggcattcagggtaccactgttactcctgggactatgatatctggaaacgacctctcacgtgaacctcagtggcaacaccttgagtgtgtttggcctctcgtttaaggagtgagatggctaatactggctgtcagtttgacaggatctggaatccctaagagacaagcaggactgagatgggaagcctgcagcgattgtggaaagcaccattccaatggtgagaaccccagactgaaaaagaaggggagtgtgaatccagccctagcattcttctctctcagcttcctgactgaaggtgccatgtgccaggctacctgaagacccattagccatgacttcccaccacaatggaccagccccttgcactgtgaggcgcagtaaacccttccttccctcctcgtgctcctttctccaggctactttatcacaacacgaacagtaactcatgcaggaagcattaactgactttgtatttttggaaaattttctgcatgtctatgaaagaaacacactcttcctatatctgaggattgaccctgattagattgttccataatctcttcttcatgaattcttcttttccccctttcaaacattttagcaaagcattcccaagtgccaactctcagtgcctcctcagagctgatagcttgctctggtcacaggaaactccataaaagtgcaccaaagacctctcccctgcctatgtccagccgagcacaggcttcttcagggaggatccagctccaccctgcagagtgagacatcagttcctccagctgtgagttgaaaatcatcttaagctggactgtgtcagaagaattagacaaatactgttttctgggtgatgctgttcctctcttggccaatctcagccctagaatctactcccttgtctgtcttaaccacctttcctgatgtttcttccccactttggttgactccacgactactgtaggtttagctcccatctagtatctaggaccacagctctctagaaatcaacttgacttttctccatcaaacatattatgtaatctctgacattggttcccatcaattttaggacctctgatgcaccttactgttctctaaaccctagtccaaactcccaccagctcttgcaatgtccctgtctagaacctgaactattatctccttcccaaatccctcccgtccatggttccctgcatgacacagtcttttccatctaccattcattccacgaagccataaatcctttcatgaattcacgggggatttgggaagtgaagtacaaataaatcttccatgctcagattagtaattcaagacccaaaagctgcaaaaacaacaccagattaaagcattttctttatcattcaaatgaattatcacagcaaaattattaaagttatatctagaagcagactccaggctatttcttgcttttcctgggaaactttttatgtgtagtgacttcgtatcattctgtcccttaaggcgttcttcctgaacctgtgaactcatcaagatacaaccaatagaaatgtctacctagaagacaacttggaaagtaaaggaagattttgtacatggaacccaagaaagaaaaaaatatctcaagaaggcaaagcagggagaagaggaggaggaggagtaagtcaagctactccctgttaacatgtaatttactcctgttacttattttttgttttattggaatagtgaaaagctactgtgtgtctaccatattctacatactggagttgtatctcatcaaaccagacagaaagccttccttcaaggggacaactgtgttgtaggtgtttagctaatttttattatttattctgtttatcaggagcagctgtgaagtctttttgtgcccttacctcctctgcattaacttcttcattatttgatattctgtctctcatcataccagcatttgtatgcaaaccttttataacctttaataggcttttccaaagtagattatccattgtgttacatttcagcacatttgtggtcttcctttaactttcatacacacatacaaagtcaaggtcatgcttaagcgattgctctgtccacaatttaatataaaatgatggaggaaggcttcacggagtttgtaaggtcatctttcagtagacaaaaaacagtttgccttcaaaccaaaccaaccccagtgagaacattttcaggaacagaaagcagcatgactcttactcaggggtgcactcttgagattattgagttaagtgtctcaagccacattaacatcctttaagcctgattccttctctcaactcttacctctccctaggcttagcaagagtcagatgcagactcaatttagtactactaccctagatggtccaaggaagctaagattgatgaaaaatgtgctaaatatattctcaaatcaagcaaaaaagattgttcagttggttgtgctaagaagtttgtggtacagtcatgcctctaatgtaaaatattttataaaaataaaataccttttaaggagatggggctggtgagatggctcaacaggtaaagtgtctgctgcctgagcgcaatcccccaggccccacacgtggctggcaatagcttgtttgtgctctaacaaatgctagaacacatgaatcagccctagcagctgtcctctggcctacaaatacatatacacacaaagaaataaaacgtacatatatatgtatatgtgtgtgagagagagcgtttgtacacgtatgcatatataccatttttaaaagaaaagagacttctctgtgtttttcccaggtcccaggcaatagcacattcaggtgaatgaagatgaggactgatgtttatttaaaagctttagcttcatgagacctttatgggtccagtgtgcccttaccctttcctcaatcatacctcctgtctccttttggcaaaacagaacaactggaggctgcagggaagttttcttagaagcaatggttatgttttccattttccacttagcattttgcatcacacaacttgatagacacaatgactgaaaaataccaatgggaccagatggcctgacattaaaatcccaacaggcaaataaataatctgctttattgctttaattctatttgtatataccatacccttcattttctatacagcaaaatgaccttgaactctaaagtttaaacgttagtcggggtatacatactagaacacgtgcgtacatgatggcctcaactataatatgttgtgctttggcagaattctgggtaactgttcaaaattattatggaaatacatactttaatataagtactcgaaataatataacccaagcacccaatcaattaagagaaaaaagaaaggtgcattaatcatttagttcttttaagatgttgagaaactcaaacacagtagttcttgttaacgatagagtctgaaacgtcaagtgggtgcttggaggtgcagctgctgaatacaccaggtctttccctatacatcccatttccaagcgaggcccagcaagaaactaacatcgccaagaataaaacagaacaaaagctgcgtgagtgtggtctctctcctctcctaactcactgggttgctctcacctgtgttcttgggacgatgagaaataatcccaacgcttgtgtgatggaacaggctgctgggagaggccctgcattcaatcttcagtatcagaaaaaggaatcagtcgtcctgaatgaacttgaaagctcgtactccagcctgtgcattagatttgcacctgacttttggtagtaacctccactgttgctgcttgagtggattgcaggcggtaaatgctccgtccagatctgaaggaaactatggtaggcttcccggctccacaactgctggcaagttgaacttcctgcctcacacttacctccctttcattttctcacaggcgaggcctgcttccactgagatgacctcagcaaaggttcaaggccttggaattttgtgcctggggcctttcactgagaaaattgagtgtgagaacttgatctccaatagtttccgcctattgtgacatctctcctgggtctcttcaccccgaaattcttcatttcttttcagaatttagctgaacagcactttcctttgcctgtttatctccatgtctgtctccctgctggtatttattgcttatcactgtaagtctttattgaatgtaatctgtttggggatatagttggcatgaaagatgctccaccaaacaaagttgtaaagtattatacataaatacttaattcctcgatttatttattatcgtcattacttatttaccactgtacgtacccaggacacctttgaaagaaataaatctggtcagttgctctcccaaatttgatcagaatatcttgtaagatataaattatggtgttatataattattaatattcttcatatgactggcatagattacagtttacaaaaactttttcacatttaatcttccaggcacccaatattaaaagaacctcagctccatgtttctggtcaggaaactgagactcagaaagtttgggtgacctagccaaggtcaccccagaaagaagcctcacaaattggcacaaacccaggtctccggctgcaagttcacagcgcttccctcttcaaagtggtctgtgggctgtgtagattccaggaaatccagcaaagggctcacgagaaacagaatggccctgcaaccccatgtgtccactctgtgactcttcattgaggtgaagagttaactgtgtgtttatgtttccttttcagctaacttagcccaacttttttatttaatccaagctcattggagtctaagttgaatttgagactgctatactatttttttctgtataactgtagacaagctgggaaggccaccacagtgatcgctcatttataaacaagtacagtaggttgtattcaccccaaaatgctagcaatagctgggctacagttgtggctttcagaggtaattgtgcaatgtgtagggttaggatcctgatcagaagagaatatcaataaaatgggacaaagatccatgaagaacaaaggacaataaacaggttacaggagtgagctgacgacctttattactgacaggctattagggcacttttaaataatgaatgtgcgtgtttggaagtccaataggccttacaattaacatcagctgcattcactcgtctcgttcttctttacaccaggagtagagggagggaaacacagataaagaatttgcatagctcagtcggcacaataaaggtcccacatccctctggaaaggcaaaatcgtttattttatatacaccattccttccagagcaatcttcaatagagaaaatcactgttgcatccaaaattttaaagtattccaaattcgatcatccttgggaaaatccctacctctcattcacagacttctacactaactcctgtcagtgtttgggcagaccttgaagggaatcgactaaacaaactgaaggagagatgctcagaaccttcactgggtgccacgaaaacatcttttgctcatagaacacttcccagtctactcgaaagtccgctctgcaaatctgggtaccataaagtcattccacactaccctaaccctaaagagacgctttggtgcgaaccccaatagctacagacatgcatttcctcaaaaggaataaattagctatcgaatctcattccagcagtcaatgaagcacattaagtccccaaataaatacactacctgggaaaattttattcacttcataataaaaacagattaaattgccactttgaactgaaaaataattactcttaaaccaagtataacagaccagaggcatccattttgtaaaagaaaaaaagggagataaacagaaaataaaatctctcagctacatttggaaactatcaagaaatgaaatgaaaaataaggactgtgataaatcatgcatgtaggtcagtggatgagggaatgtttagcatgttttctatttatattcttatttagcttggtaattaaacataaattacaaaacacaggagtttcaaattgggtacgaaaataattaactttttttgtcaagtgtgtaaaaattaagctgttccagtgggaatatgtcatgttaatcaataacccactgatgtcattagcaatagcttcattcaccaaatttaattgtatttccagaagataaggttaaaataacatattttcacctttgtgccactgtgaccaaaatgtgtgccactgtgacaaaaatactaagaaagacttaaagaattactcatgatgtggaaggttccagagagtgtcagtgtgtctgtcaggcatcagtatgtctgtcatgctgcctttcactttcggaccctgaatcgaagcccatgggtgcacacatccaatgtgggtcctcttttcccttagtcttttctgaagatggaaacacatacacacacacacacacacacacacacacacacacacacgtatgcctaacacacctagatgaatccgaatccagtgaagacagcaatgaaaattaactatcacaaagaatgaggatttgcagtggttttcaataaaggccattgagacacatttaatgaaatgtaaaagaagaaattcaaactgataagtagcagacaaattatactaacggtgaagaatatgatgctgttacagataatcaacaagtttggcttgagtctctgttaaacaatggtgtgagaggtttcatttcaattatctcaaagagggagcagtctcctcagggttacaatgtattactggacagtaaatcttggactaacgctcatagagacaatgtttgtctaacagagtactcagtagactaagggtcgtgagtctccaaaagagactttctgttactgtcctttttcagggcacttgtgttagtaacaaatcttaaggccaggcttactacataatgcaagatgtatcacacacaaataaggcaacatagcacatgtattagctttctggtgatccaacttgatcagtcctaggaaaaccatgttcttctgacacgcaccccaaggagtggatcacagacacacgccaccatgcccaactgtcatcaagatttttcacttcaggatggaactactcattttcagatggagttagactattctcccaacacctcaaacaagtaaaactgtatgaatcaaactgctctggtgtgctttctgctgctgtgattaatcactggctaaaaccaacttgtggaagaaagggttcattttgggttacagtcatcctaccttcctggagtctccactgcaaccaaagctgcacctttaccaatggcctctcttcaggaaagcttccgtcctgccacctagtgccattgcttagttgttctccatgaccccttcatgtaggagactctcacacatcctgggccatgttcttcagtcagcttggtattcagccttaacaccatactggaatacagcctgtgctaaccctgggaaactattccgcagtaattttcatttcaataatgctattcttatacaaatcacaacttatttttgagcttcaactaaccagtattgtggtgatttgaaagaaactgtcaaaaaaaaaagaagaaataaattggcccccaaaaaaactattaggaggtgtggagtgtgtgtggccttgttggaagaagtatgtcactgtggaggcagactttgtgtgtcacatatgctcaagccacacccaggatctcagaccacttcctgtttcctgcaaaatcaaaatgtattaactgtcagtttcttctgcctacatgccttcatgtcctaccataacaataaggggctaaacttctgaaactataagccacccaattaaatattttcctttataagagttgccacggtcagggtgtctcttcacggcaacagaaacttaagtaaaacaagtatctaccatgctaggaaagcaaatattttagttccacagatctcaattcaaaaacatcatacaaaaagccatggtagaatctaagaaagattcccaaaatttcctttaagatgtcacaagctacatgggccaccattgcctgcatttttctcaagcccatttctgagccctaacttgcattctagccaaagctctaaataccttcataattcttcacaaaataaaatggtcaggtccatcacagcaactctcactctctgttatcaatttctcttctagtttgctttcagctactgtgaaaaaatactgaccaacaccaactgaaaaaggagaggtttacttcagctcatgggtttcagtccacagtcaaggaaaatcagggggctcaggacaaagactgctggtggggactggggcacaggatgtgacagagcgctgctcactggcttgctccacacagcttgctcagcaatctgttgcagcccaggcctaccagcccagggatgggaccttcttcatcacttagaaattttcaaaaatgccactacagacatgcccacaggccagtctgatggaagtaatccctgaactggtctcctcttcccagacgactctactctgacaatttgacaaaaactaactagagcctttctcctccacattctgcctcacagcagcactgcccagggcttagagaacgctcagcttacagttctggaattctgcctggtactccttcacttcacagaaagaaggcattgcaaaaatatacagaacacatcattctgcaattttctataccaccaagaagttactgctcaaagtagatagcctcttaaaatacagctgagatcttagaagtaagatagggtcttgtgaggacacgtttgttcctcaagatgttgtcattcaccccacaaaggactgtctatcatttggtatggtacctaatagaatatctgctaacagcagggtgctgagtattgccagcgttgcatgagactggggtaactccatagcctgcttccatggacaagagcaaggccaggtgacttcagatgacacctgtgatttgctgtttcctcttccttaagtcatttcaccctcaacttcctaacattttctgaaaacactttctcgataaatcacgtgttatgattaaaactaccatgtcaaaggctcttctcctgtggaagagcagctttcaactttatttgtatatgaaatagtagaaggggttgatttaaggcaggtgcagtggctcaaatctgtaattacagcatttgagaggctcaggtaggactgtcaccatgtgttggacactaccctgggctacatatcgagttccaggacaggcgctaggctgcagaatgataccctgtctccaaaagaaccagaagtaaggggaagaggataactgctggtttaaagtgaggattattttgccctacctccagagaagtgcattttacaaacacgccataaagctcaggattaggcatttaaaccagcactaaatatgggttcaacagagtagcccagcgaccactctttatgtttcactggcttaaacaaccactgcatattatcaacaatggaaagctgaggactttactgacgtggcaacattcgaaatcaatgcatctgagagcaaggtgttctgtagttactgccaggaccttcccatcccccggcttcaactttatgttatgacttccactctgttcatgttcacagcttcaaaatgttaataaaacatgacaagtgcaaaagtcaaaataaagtagaagaggtgacatgtaagtaatggactgcacattcttaatttaaatcatatatatttattcactcactcagtaactgaatcctaaccaaatgaatttgtaatatattccagtctagttttattaggatttgtgctgtatgggtaagtgtgaaaacaaagaaaatatattgctacatcaacttatattattcatgcatataaagttctgtgtatctgcccacacaattgagaagatgcattaggaagtcgattataataacaagaaaaggttatttgagtcaaatcaaaacaataaatgggctagagaaaaaattgtaaaatatttgttttacattttcctccagtggcacataaaacattatctccttctctaagagattatgaacatttctcctgtcatgtggcacaaagttgtgatttgtttacagtcatttctgtctctaaagttacacaagcctccttgaactttagagaaagtatattcttgcctccattgctgaatattacagtttttatttctaattattcccagatctatataagtactaaaaggtactttaacaaaactctaatttgctaacgtattgattcaccacacttggcactctctcttaaaacacacccatatttgttgacaaggttcagagtacatgcttggctagtctctcacgaccatccaccttctcctcccgggaggtgacacatctcttcaagagttagctgtgaacattcccaattgtgcctctgatccttctttatatagtatttgatactgttaaatgctaaagaatcatacaaaaggtggctctaaaataaagagatgtttctttgaaaattaagatgggtgtttcaaagaattgttactttaaagcatctattaaaaattccaagaaaagaaattttttaaaaatcctattcaagtagcttttttaaacaactctataaataaaccaagtaaacaaggaaaaagacattctcagtgaaaactttcagacactgaaaacagaaattgaaaaagacaccaataaatggaacaattttccatgtgtatcaatttgcagtattaatactgtaaaaacaatgggtacattgctaaaagcagcccacagattgatgattacacttacattcttcacagagctagaaaaagaaaacgatcctaaaattcatacaggaacacaaaagacaccaaatagtcaaagcaaccccaagttaaacaagcaatgccaaaggtattctgatatctgatctcaaattatattacagagccatattaacaaaacagcatggtaatgactcaaaacagatttgtagaacaattgaatagaataaaggaaccagaaatgaactcatacaactatagccacttaatttctgacaagagtgtcaaaaataaacattaaaaatgactgcctcttcaacaaaatggaaaattgaatatccacagataaaaaagaaaaaatgaaaccagatccaagtctcaaaccatgcacaaaagttatttctaaataacttactataagacttgacactctgaaatttctagaggaaaccccttcaagactcaaggactttctcaaaagaattccaatagcatgggaaatgattccaataatcacaaagcttctgcatgggaaaggaaacaatcaccacggtaaagagacagtgtataggatatggaaatctctctgttagctatacttcagctatgtaattaacatctagagtacataaaaacaatattgggttgagattacagttaagtgatagagtgattttctgtcatacataaggtgctgggttcagtcaccaacactatcagaaaaaaatgcaagcctagagatatggttcaattggaataccgttctattcttcatggaaacctagatttgaacccctgaaccacataaaactaggtatagagacacacccctcaatgcctgggaggtaaaagtaggaagatcaggaattgaaagtcaatccttagctatttaacaagatggagactagcctacgctatccatgatagccagtttatgaaagccaaaaacaaatgacaaaaaattaaacatcaaagaaaagtaagtggagtaataaactctgaagacagttctcaaacaaagaaatacaaatggccaataagtactggaaaagtgctcaacatgcttagccttcagagggatacaaattgaagcttctttgaaattctccttcatcccagttagagcagatttcattgaaaataacatattccatgcctatgccaggggtggggaaagggaatccttattcttcactggccggaatgtaaactaaagcttccagtatggaagtcagtctggaggttcctcataaaactgaaaacaggaccaccatatgatccagttgtcccattctggagtataacagattctaagtcagcattccacatagattcttgggcatacaagtgtattgctgcattattcacaatagtgaagcaatggaaccagcctatacatgcatccacatatatagagataaataaaatgtggctaatatacgaattggaacatcgtcagctttaaataaaagtgatatcatgatattttcaggaaaacgggtgcaaatggagaccgttatgttaagtgaaataacggccgactcactcgggaaagacaaatgctggactgttcctcttatgctcagaactcagatttaaatgtgtgtgagagaaataactgcaaggaaaactgaggccatggaacaggaggaaagatctgagggagcaaacaagatgggacacgtgtgacatgacggcagacgagatcatctgggggcagaaaaggagccaaccagcgaggtaggactcacctcacagagagagcggtgagaaaggaggaggagcaacagggtgtggtgacacaatccacaaaaatgtcaccgtgaaacccattacttgtatactaacaaaaaacgtgttttaaaaacttgtccccatgggcacagctataaaacactcccatgcctaaggctcagagagagagactgtaagagccagaggagcatggcgtttactgtgagatgcttttctcctactgacgtcagaagctgcacctttaaaagtctcctcagcacaaccgcctaaacaggagctgatcaaggacgtgatgaggtggacgggggcagcctaggaggatatgtaaccctgtataaaaaactgtgggaaactgaagaatgccaagagtgcgagaaatggtcttcctcagtgaagagctcatcagttggttaccccaacatccaatggtcagccctgaaaacacacataaaaacaataatatgtgaatatatgcacataaccattaataaaaatagaacatgaatttgaagaaagcaaggagagatacatgacagagcttttagagaggaaaggggaggaagaaataatgtaattataatctcaaaaataaaagaaaaattaaaatccacaaaaatactctcaaatcttttatatatacatttatgcatatattacatacataatacaaggagaaaagcaacgaaggtctaagagaattctacaccctctcaaattgcatcccagggttctaattgctcctttttaaaaatccctaattggaaaacatcaaggatccaatgttgctgtaatgtacacaataaatgcacaatacacaagcctctctaatgagacccatggatagtcccatcatatttactaattaatttatgttttatgtattgacatggttttattaaaaccctaaaatttttaataattttcgaattgtagcttttaaaggcaatacgcacaaacagctttaccatatatgcaaatattcctttaatgagacttgcactgaaaagtgccagtttcattcttcctcagttatagtcttcaaggcaaagactgagactacctatgtctttcaagtgtgtcagccatccatccattctgactgagtctttgaggagttaggggaaaactatctagactgacagggaaccaaacaagaaaattctgggtcatggtatatggtcatctttccttttataacatactgccaaattgttccccaaaggagaagttaaaaatctcatgctcatgcccaagctacaattccactttctttaaatccttgccaacatttatcattgtcaaagtcaagcctttgccacactattggatataaaactttactgctttaatttgcaactcacttagtggagcagccttttagtcataaaacatcaactatttgaatctgtttctccatcaattgcttccttcttcctcaggtgagctttcctcctactgacttgtagatgtgtgttaggtatactaaaaacactggaaattacaaagcttactgaactgaaagcagaaatcctttgtctgtcatccagtcctgaatttttctccagagattcaatcaccttatggacttttggctgtttttcataaaatttatctcccctattttgaaataatatgattatatgttgttattattattgatttcctatatcgagggttgagggtttagcatccttacaccattatctcaccctcccaataaaattataactcattttcttcttaaaatattataatttggaatgttagattatataaaaatcgaccaatgcttagatcattattgccattattgcctttccttttttaacattagtttttcctgaaataaataattacctcatttcctcccatggtttccttcactgattcttcctatactcacagttcaatttcaacataacactatctaaattgttttccttttctttgtgagaaaccctttgtccttctgttccaacttcgattgctcattctcccaacatagttttctctgggattctgagatctgttttaccctgggaatttgtcgctttctccccacgtgaagaggtctctgtttcctggataccctcctctactgctgtacaaggcaacctctgtcaatgtgaattgcttttaatcaaattagaacctaccatccatcaacctacagattgatatctaattcattccctttctctattttgagttttccttctttttgtctattgtccagtgttgctgaagagtttgatgtacttctgactcattttccccagacttaggccgtttcttcctcctccctacaagatttaagagtcttctgttcatccctgtgttctgaaatctcatgatgttgaagggaggttgttttgttgttgtttaggggattgattttggttttagttttgcgttttggtggtgtctcaccatgtgtcctatacaaaacagaaagatcccaaaataaaacaaaagcttcttttttcataattgggggtgggaagactcaagattaaagtgctgctagatacagtgtgtgatgaggacccattcacgagtctgtcagtgactctcttctcactgcgctttcctaagcatgaggggcaggaagacaacaaagcaaacattcgagtgaggagctgagtgcagcatttgttatgcaagcctgaacacctgaattcaatctctagcacccatgccaaaagggaggtatggggcatgtgcttgtaatgtaagcctggggaaagtgagagaggctgatttctggggcttacaggccagccacactaggttactctgtgagccctgggtcctaatgaaagaccttgactcaaaaaataaaataaaaaagagacagcttctgagtgtgcacacctgtatgttgcatacctacctatacccacatgagcatattgctacctgcatacacacacaagcacacacacacacagagagagagagagagagagagagagagagagagagagagagagagagggagggaggggagaggtgggggcaggggagagagagagagagggagagggagaggtggggggcaggggagagagagggagatagggaggagaggagatgtcatctagaaacaaaggatctcatatctctttgataagggcattaattctactcatgaaggctccatcttcatgacctcctaaaggcacccaactcctaacgctgggttcagcatacaaattctgggtgtacacaaacattcaacccatggtgtattcgggtgtgttctttttcacagaatcataattttgttcaatagaattcaacttctctcctgatgctttcttacacagacacctgctcctctgaactgtgtcattctccatttccccctttcttctatgttagagcttttcatgaatgcatgataaaccttgattacacattattattaagaataggttattagccagccatttggaagctttgtgaagaacaagactttataactataaggcaagattgcagcattgttttactcagaaccatgagtatccatgtctctattttcttttttactatgtgtttggggggagtgtgtttcagagacagaaaagaccactgtggttgttaccattgacttttagcttcacaggatctagaatcactgaagagataagattctggctatgccagtgagagtatctaggttaggttaactgagattggcttaactgaagacacagctttaatgtgtgtggcattttaataagaatggccccatgggttcatatatttgaatgcttattcatcggggagtgcattagtcatcagggagaaggattaggactcatggccttgttgcagtaagtgtgtcactggaggtgagctttgacatttcaaaagcccaagccaggcccagggtctctgtcttccttctgcctgtggatccatatgtagaactctgagttccttcttcagcaccatgtctgcctgaattctgccatgctccccaccatgatgacaccggactaaataaatgtcagaaagtataagcaagcaccaattaaatactttcttttaaaagaattgctgtggtcctgcttgcttctcacagcattagaacactgactgagacaatgcagatggtaatattctgtgggctggggtccttgaatgcatagaaaggataaaactagctgagagccagcattcatgactctgcttctgagtatggatacattgtgacaccagctgcctcacatctgccaccatgttttcctcgtcatgatggactgtaacccccaactagaagccacaataaacctcctttgcttgcttctcgatgggcatttgacccaagccacaagaaaagtaactaatatgtgcctattacaaaggttttggacatcaaccatgaggactgtgatgaagcatttctctctaattagctactaggatttaatttagcactcctgccttcaacagggagcccaagtgcactcagaacagcttctctggagaagaaaccttgtatctcctgccagagtctgaagaatgagtgtgtgtgatgaagctgagagcaagaagcacaagttcttcactctcttttctcaactctcttccttctcctcctgagacccctggggtatttgagaagaatcagctcctctccccaggaagcttctcattagtttcttaggttcttattttctcttttctcctatgtcaaccacccctcagtcactggatttccatcttccacatgtattgttatctctcttgtctgtggccatttcctcacgttatctgtgtggctagaggaggagtaatgataattacttggatctatgcatcaggtttaagtcaaaattcccttgcaaatatctactcctagtttacactcctatcgttggatttgatcttctcctaaaacattatcatcaccataatatccatccttaagatattcatgtgaggctcccaacaagatgatacattcaataaaactttctaaacaatcattaattcaagtcgcaaatatagattctgttaatctggggaggtggggacaaaaggtttgttatcctgtgttactgtagtgttggtatgctatgctgtgatattctgggctatataagaaaaatgatggagctatatttatgcattttgggagacagaagtttgagtgagtattctctgtgaatccaagaactggattcttgaaggtcaaccagatctttgtgaagagactcttggaggaatcaatactgactgaatatttaaatatatcagaggtgttgcttttcttgctctttttgaaaggactgaaaaattctggttaattttaattaaaaaaatgtcagatcactgagctctccctttcgataaatgagtctatctgttaacttagccagaccacaaaggtgtattgtctcaaggagtttagattggaggatataatttttattgcacaacacaagaggtagaggctggttgagcggggtgaagttattggtggtgtagcattcaatcttctctggcaggtacagaggcaatcttctttgcttcaaaagagcttcagctacttgcccaagcattttcacaaagcagatcctactttgtcctcaccagaatccttaaagtatttagactcagtcttattttcctgtgtgaaactaagaggggtcaaaaggcaaggccatttgtcaagtcagatgagagtttgaatccagatctccagatgccaaggaaaatatgttattgatcacttcaaagacccagccaccagcatctcttccaaacatgtcactgcaaatatacagagtccaataccaaggtgatggaacaaagcagggactctatcagccaaggagactgctggcagatgtctcatggcatatgccagcacattctgtcatcccttagggcaccagggcatcaggtgaccaaaaggacatgttgtgcaaagacctacactcattacaaatggctcctcttcccttttgtttcattcattctgagcatctggtacctttcagtgaagtgtcagaattatacttaagacatagcacatcattaaaataaagctctgggctaataattatgtcttgttcatgtgttttatgactaaagattctgactttccctcaaggtttccaactcactcttcaaaattgcttcttcctgaggcatttgttacattgtggatgtgtccccaacaattaaatagcaatttagttctccatctctagatatttctatttgaagcagtatcccagagctcaagctacttctgcttttaagatggcatttatggagtcttcagtcagctctaagtgtgactgcacacagacgttcatcagagtggaaagtcagctctcagcctccgtgctgctcacacacccccccccccaatgtagctctttatcagcaacgagggtaatccctctcccactctgccttcatctcaccaaatatattcgacagctattaagatatcttagagcctaaatttcacctcagataggggatagggcatgtgatccggattatacaagcatgaactcttactctcagtattcaaatttatatgttaaatgcatcctgcaaagattaggtttgggtccagagtgctgctttggagaagcagggccttatggaggttttgggggtgacagaagtcatgctactaaaggaaattggagggccttactctcttctctttttctctgctccctaaatgacgaggcagaagacgtggtctgccacgaactcccaccataatacactgcccgcaccagaggctgaaagtaacagtgccattctgtcctgccctggaccctccagaatcatgagcaaaataaatctttttgagtgagttgcctccaggaactcattataatgatggacagctagcatgcttagttgttttaggttttacattattattgtgaaaaaccaaatcagactgtgagatcgggcatctttaattatttggtaagttataaagaagtagtacttcggggctggtaatagcattttcatacagaatgccttgctgaatactctttgggagctggtgaccctggtactttgtgtaatggaccaggatcattactttgtgtaatgtaatagaaggatgttccttgttgttttaaagttgaaagccttcttcaaccatctccttctgtggtttgatgtctaacatggctctgccatgtagagaaaccaatagcacacactgaggcagcttctctggcaaaagtagtagatgcatgttaagagatttagacacagaataatgccaaatgagcctttctccacacattcatgggaagccatctgtgtagtatttcacaaattattaatttatgtgttaaactacttagctttgctactgtatgggagagtgagaaaagcattttaaataaaactttcaatcactttccctcacaaaaaaactctattctgttcatactggctagatattgagacacaaaaagtggattgctgtggttgtatggttacagtaaagaataaacatgccttgttgttgagatccaaatttcagaacccagtacacagcatttcctttgtcaggtggtttggactcttcattaattctattagcaagaattttcaactccttttcaggggaggtgattttctgtgagctgagggttcaggcacaggaactgagtcctgtgcagccttcatgcagcttaaaattatttagtaaagaaaccagtctcttcataagaaacaccccttcccatgccatgcacttggccttaggtgtctctgggtctaccaaacttaggtaagtttagccaactgtgatctaactcttacagaactattaaaatatctcatatcatcattatattgatgatatatctttggttgttataattttagtgaaaacaaggtagactggaaactccacttactcatctaagttccttttggcagattgaaaatgttcatgttgatgaaatcagcaagcctggaaacatacacactgtgaacaactgaaaaatcagaaaaaaatgttagcaaacatttaaaatgttagtaaatcatattagccagtattaattaaagattaccaatatgacgtgttctctacataggttatttttctaatgttcatgataacatgactaacatgtgaagagataaagattacctcaaacgtagtgagaggtaagctccttatcatgtatggtgctgatacgttcgtaagtgagatctctgaatatccttatgcaatatttatttgctgtttgttgagtttcttttgttgtggttattgttgtttgtttttgtttttgtttttttttttgaggcagggtttctctgtgtaagaaccctagctgtcctggaactagcttgttgagtttctactgcatgtaagtcacaatgctggcatctgcaaaagggagtaaaagtgaagagaactaggccgccgggtggtggtggtgcatgactttaatcccagcacttgggaggcagaagcaggtgaatctctgtgagttcgaagccagcctggtctacagagcgagtggcgagtgttaggacaggctcgaaagctacacagagagattaaaaaaaaaaaaaaaaacctccacaggtggtgagaactctcatgtaacaagagagcagttcacacctctgcctcagggccttctacgtcctgtgtgttggctttaaactctgagcacagagctaggctcaaagggttgaacacaggacatctgtgtcctcaaaggcccatagaccattgcagatacaggcatccagatggcttcaacaccccaaaggtctgagagcagggcaaagacagggtgtacccttcctaccacagtacccttcctgtgttcatgaagtaggaatagaccctctaaagcctatccgtgactttaaggaactgctgtttttaagtgggcgagggatgtgctgtaaatgatactgaggcggtgagggcaggcaagctgaggtgacaaacaggagtttgggctgaggggcgtggctttcggtacaacacttgccccacaagcaccagaccttgactcccgacactgcaaaaagaaatttcatgtctgacaagagtttgtattgagggtgtattgaggtttcagaaggtcaagggccagacactaattattctctagaattgagcacttaatttggaatatatccctaaacattcccattccctctgcttcttttcctaaatgagccttacaatggttatgactgctgtgaatgtcaaaggtcataatgacataaagctcctttagaacactgaatgctacctaaagggtagatatttcttatagccagagacagttgtccctggtcatcatactaacaattaccctccatcctctcccaaacttacagtcagaacacccttagtaaagatgtttatgactcatttataacaaaggacaaggagagacagttcataacaacaacaaaaaaaaaaaacatgtgcccatagtcagatgtcgaatccacttattaaatatctcaagtccaaaacaccctgtacgagttaagtcaggtcagcaagcatacgctcaagaggtacaacagacagtaaggcaggtgggtgtcaataacttacaggcatataaaaaactatccaagaagctcaagactgccagagatctaaaacctaataataaaatatgaaaaggtttacagtgtattttaggaatggtacaagaattcagacaggggaaggaaattcacaaatgcaacaaattcaagaaacatgaaaaggtcaagtgtaagtttcttgaagaagaaaatatgaacacatcgtgtttctaaccccgctatattaggccatgtgccataaccaatggccacgtgattaatgtctgctgaaagaagggaaagaggagagaggggcaagatggacggggagtaacttagagtggcaggaatgagaagcaagtgctggagtgagaagggaaaaaggaagggaaagagctctaatcaactcaaaccttccagtccttgagggttctggatagcaccgccaatgaagaaccagaaacatctccttaaatgggtgggcaggaaaattaccaggggttggggtgggatcacgggaaggtagtgctctattggaagctagaggacaattacgatgcattaatccaggctcagagcgatgcctctgagagaaagcattctcagtgtgtgctgcaacatttgtgatgacagagctggcctccgctgaactcttccctcgtagatgggagcatttatggggaagcaggacgtgtcttatccagggctcccctagtgagcactggccctagagatgccattgcttctgagtgatggactgggtagccacatgcagtttccgagggaaccagagcattatcacagcaagttggctcaggagaggaggaaaatgctgggcacgtttgactatgagtaagactagagagcacagacactccccaaggactccaggactactggaaagaaatcgccacaggctataggtcctccaaatgcactaggagagattttgaggtgagggaatattgctttgctgctgtgtgactgttacggtgactcctgggattctgatctggggaaaaaaatatgagacacagaaacaaagcaaacaaagttctgtcagggcatgtgacctggagtctgaacttcccttgaccctgacatcagagggccccagaggagtgatgtccccactgcttgctgcagctggcagcaaccagcatcaagagtcagccagccccaaagagtcagaaaacaagagctgcaatcaaacacttaggggaatacagacatcttccttgaggcaaagcacaaggtattgtgtaacagaacacagcggccttcatgaacccgtcctcatttcaaaaacctcggctggcagagttctgctgtgtggacctatcagcttgaaaacaaaaatccatactggaacagcaaaaaggaaaacaaaaggtgtgtgatatcttatttttcaaaacaacatcaacaatacacagtcctgcaaatggtactccatgctaagagcaagcctggaaagtagaatgtgttataaagggataaagggaaaatacagcaggggaatagtatccctccataggaaatgggctcccgaagcccatttgtacactagggataaatactggttccactgatagaggtcctatagactgcccaggcctcctaactggcacccacattctgagggtttggttcagtccaatgctggatccccagctttacgactgggatccatgtgctctcactaggtcaggtcagctggttctgtaggtttctccagcatggtcttgactcctttgttcatccttcctccctctctacaactgcattccaggagtgtggctcagtgcttagctgtgggtgcctgcttctgcttccatcagccactggataaaggctctaagatgacaattaaggtagtcatcaatctttttgagccattggccaaagggatcccatagaccttccccaaacatcatagggtgtttccattgctattggttaccctccataacctggcaataagactttattgctgaatacaccatatacttacatcatcaaacatggagaaatggagccagtgcccaagcagaagcttcacccctactgactgacatccacagtgctgaagagtgccatccatgctacaggaggagtgaccattggtctcacccaggtatgaaccttgtgagctacaacagttgaccgacagcaaaatatgcccactggtacaatggaggcactaatgttagggaagtaagtaaccacatttggattaagtttgaggtctgctccatgaactagaattcgtatctgacattgttaattagaccaagcacatgaggctagataggtcatgggccttaagggaaaacctaccactttcatcctgctaaatgagcataacaataaaaattcctgataacacgttgctatacacacagatcagctcatcacccagccctctccagagaaacttcttacagtagacgggagttaatacagcgacccacaactagacaatgtgtagagaataagagactttggagtcttcagtcctaactacattgtctatggcaaacctctccctccaaggctcagggatcaatatggaaagacagaagagtggtggtggacggttccaagaaaatagcattttctagacacaacaggagtgatgcaatatgaactcacacagactgtgacagcatgcacaacacttgcataagctcaggccagacaaaagtcccagcatggagaaggagaaggggccacaaaggtcccacccctaaccaggaagcgatttgaaagggatcccttctgggaaagggaaaattggggttttttcaatgaaataatactgggtatatcaaccataccccagggcacaccccatgctcagatgtagttggccaacacaagtcagagtccatctgtgtgtttgtgtggggagggagggggtgttttgtttggggtttgttttcctttttgtttttaagagggagagaatatgaagttggataggaagggaaggcagaggagactctgacgggatttaggaaagaagaaagactatgattaaaacatactgtatgaaataatcaaaaataaatattcattaaaaagcaatacgtccaggggctggagagatggttcagcaatttagagtactggcttttcttgcagaggagccaggttccattcccagcacccacttggtcataccagtccggttccaagggatcatttggccttcatagtgcccagatatgcaggcaaaacactcatatacataaaaaataaataaatcttttagagaaagagatcacccacctctatgagtgtaggcataggaaaacctgctttattaggagacaatgggaatgacaacactagcactccttaagacagagttacaaaatgaggcattgtgctttcttgcccttgaattatttctccaggagtaaaactagaacataatctgccgaactatgtaatgtttacggttttgtatcccaattgccatttgtttcaaaattttatgcattgaatactgttttgttggcttttagtctcataagacaaagacttacttattttaaaatagtgattccctttaagtcacccatgttagtaactgtgaggttcaagatggcactattgcatttcaatgttttaaaaacctgactcactttgaaacactagtagaatgtactagaaattcaagttatgtggtttatctagaagagaaaaagcaatctgtttagcaggagaaattttgcatgcacaaagagttaatgctcaaaagtgtcatctggggtgtcaggctatcctggtgtgaccccaccgtgcagtctcttctgtcgctggctgaagccttttggctgccaatagacgctattttctggagactttgactccttctctggctatcgtcccagaagtattgatcagctccgcatcactgcctgactccccatcagaatggcgccagggtgatctcaaacccacttgtcatcccagctgagaagactcagcatgcttaggagggcggaaaggcagccctaatatccgggtactaccctgtttccccttctcctggaggaaagtatgagccattcgggtagacagcctgtgcaaggccagcactaacggatggcactgcaaacactctgcggtgtagtgactgtactccccaccccagcgctgcattcactcaacagaagctgagacttaccattttcaggttcattgcgaaaatgcaaatagcatgctattccttgcttattaattatttgaaaactttagttgaggctgaaggcaggtaactaatggctgaactgaaaaactcattccagctcacttgagaacaaactgccttcccctgttcacttcctccatctgacagttttaaaacggtatttgttttttttttttttttagtcctaagtaatatagtctctctgggtattttctttgaggtgatatttcctggattgtgactattgtgctttcgtgttttacgtgttttactttcaaaggtctcggtggctaatgctgttcaatgaggattgctgaagggaaaaaacgcctgaggtcacttggtcagctgcctccatttgtccatttcttccattgttctcgatgctctctctgcagaataagctttgtggctctaacaatgtctacgaagatatcaaaagacccaaagacaagcagctctagactcagccaagagtctagagctatgcccacaaggaatagcaaggtcactggcccagtggcctccacagcaatgctgcttgacttggcaagtggccactgcttcctgggcaactgaggaactctgccaccagtgtctgttggcatgatagagacctaggagcttccacggtgctcagctctggactggaggtccctaagaggccgccctcacttccctgtgctactgcactacagaccttctcatgaaagagacctgatcttcatccggtcgcagctgctagacaaggtgtgtgttcccaagccacctgtgcacagatacacagcatctttactttaggtcaaagtattttatttagaaaacaaattgaaaaggaactatctgaatgtcccatcaaaattataaataagtttatcagccaatgagatatattatcttagtgttttattttaataaaaaatgctttatgcttagaattattacagcaggcctttcagcttgagtgctttccaaggtggaacactgaagtacatggttacctacatgatgacatgtagtaagaactgtacagtcccaagtccgtactgagaaatacctgtctttccccctatgtcacctgatcactgcctagaggcagcctaaacccacccaacactcaactatagaaagcaccacataatctacagctagatggcagtgatgtaggactttctaggtcactcttggacctcaaggattagggatgaagcccagcatcacaagaatttcccccatttcctgacgaggctccaatatccaaggagtttttgaatcttcccacaagctgccagaggctcctggggagacggagttatgcaagtaagtttccaggtcctaaccaatcaaaagagacccgttcaactagatgataaaagctattggtacggccaggcagtggtggcacacacctttaaggccagcacttggtaggcaacagcaggtagatctctgtgatttcgagaccagcctggtctacagagcaagtgccagaacaggctccaaagtcacacagaggaactgtctcaaaaaactcaaataagtaaataaacaagtaaatacataaataaacacaaatggatatttgaataaataaacataaataaatatttgaataaataaataaagccaccagcaggacaagggcaccaccagaggatcaaacaggcaagggataggctaagaatgcatgaccctctggggctcttcctagcgtcagaagttactcccaggacactttattcctttactcttttaggtaaaggagggttgcttacccaagggtctgtcttaattgtacagaactgctgttcaaactgaattacattactggttactttctctagttcttttttaaaaaatttcaaactggataccttgtttttcctggctcatctcaggtctccctatagaaatgaactaaacacatcgataacccttctgaagcttcctctattgaatgagactcatcagctcaagtgcctctggatggcaccacgtgtacatcagaggagtcctccaagttgtcgctcagggaagctagtctatgtcagagctccagagggagtggtgggcagtggcagcaatagtagacaaaggaggaagaggcccccatgagattaaatgtgggaggaaattgttaagaggtaaggaattgtgtctacatttcccagtttccggcctattgaatattaacaaaggctctcttcgtaattattacctgttataagtgggagactgggcactgagaaaatagcatgaaagtgtttgcaggcactgaacataagaattcccaggtacagagtctgcaggcctagacatctacagggattactctacatattgtgttagtttttgctgcaacacaaaagataccttgcacccaagagtcttctaggagtttagaaacttcagatcttgtgcgtcctgtctctagtgtaaaattaccatgccctgtgcccagtctctccctcatgctctctcactctgatgacaatgtgggaaatgtgtactaatctgcttggggaataaggaaacggcttaggaagaatacaatgtattccctgggaaactatttgagtttgctaaacagaaaaacatacagacttactctcaatcactctgaagtggtccatttcaggtcccttgtaaaacacagaaacacaacattgaatgtgtgtcccgacaagagctgtcgtttgagagctcaggtcaaacagagccaaacctacccaacaactgcctgctgtaaatcacaggtcacaaaacacatctcctatctgccggtgttctttttcaaaagcaaaggcaccaccgtgctttgcacatgaaacgaaaatgctatggaaatttacaagaaaagtataacagaaacacatggcttttcagaaactcaccctttccccatatctaaattcacctccatcgccattgtcttccccattttctaagctgaaagacctcaaggttatctctggctcctgctctccaagcccctactacctgaacaggctttctgttgctctcactcccgtctcacccagctgtctctttgtctgcagacatctctgcagtccttggctgcatagcacaccgtttagaggcatttattgactcccagacttaccattgattctctctgcactacctattcttgccctgtgacctaacaacacctcctgctttggtggcatcccactactaacagctatggtggcatcccactgccaacagctactcatttgccttccccctttgggatctgcagggttttccctttccaatgttcctttctccacctcggcagacccaagcagatggagacatcttgaaatcttacctaaacggcaaattcagttcatcaaaccttcttagaacctatctgtgattatctgcgtctgaaactgtcacttcctcaaagactgtgatttcctgttcctctcggccaatgcctcccattttccgcgcccaacctcccatatgtgcctggattccacagcttttgaattcactcaggacttagatatcacagtggtcccatcatcacattaaaggaaggagactctgcacacacacttcattctttagcagcatcagtggtaaagagctactgcgaactaacagactggaaaatcattgatcatttttcagatgccaaacacttcagttattttcggtggtttgaacagtttccccaaatgctttctgaagcctcctgcttctgcaaatgctggccaccctgttatctgttatataacccaccttctccattggccagactccatgccttttgctcacctcaagtagtctgtgagtctatctctgtctgacatgtaggggagcagtcatgcatatcctcccctgaatggcagataatttttatcacttaccttgaactgttacattttttctgtatacttcaataagctgcagatttcctggagagaagaattgggattcatctagagggacactggtgccagtgatgagtaaattatatgtacatcgtgaatacttcaaaatatttattacagacatgcagtgtcttatcactaataaagttatttggcaaaatggagtcactgagaattacagctcaattgcttttatacagagtttacacagaatggtatatgtttctattaagtatcttattttgttttttattctctcctgtcaatatactttttctcaggtaacttggcttgtctatccaagtatataatcattgtccatatatacatacataaacatatgtgtgtaaacatgtatgtacatatgtgtgtatacatattgaggcatggtcttacttagctcccactagccttgatctcattatatagctgaggataaccttgagcttatgatcatccagcctctacctcccaagtgctaatattatattataaaccaccacgtacacatttttccttttattaaatttgttctttcatgatttttatacctctatatagtccattctgattactgtcacgttttactctctgttatctccttcccaatcctatttctagacatgcacgcacgcacgcacgcgcacacacacacatccctttctcacatccacgtcttttgggaattttgtgatgcactgagtttagccagaatcctatgagtgaccctgggtttgggaccacccctcagagcatggaatgtccacccgagggtacacaaatggaagagtgtttgccctcctcaagaatccagcagtagcccatagtacagctgggatagtaggtcccaatctctgatgaactactgacaggcccattgtaggaagctacggtagctgtgagacaatggctgcttggcaatgtcatgcccataagatggacaacacacagcctttgtttgtgttggttttttgcttttgcccttacatttttttcatcatccctcctttagttcctccctaggcctttaggaagatggcatgaatgccctgttcaggaatgaacacctggctgtcagttattctcagcatcttgactggacaggtaactttgtgtttgctgctcctcatttgtaaagaaaatcttctctgattgagactgacagtagaatttgcctacaggtataaacataagtatttagaaggcaacttgatgcaccccaggccttgcgactgccaggcaatcccttccttgcattaaagagcaagctttctattttctgctacttccttcttgcatgaaagttttgtatgcccttagtgttctctctctttcttacctgaggcctcatacctgttaccacaataatctccttcaatccacagcaattactctgtttgggaggatcattgttggtttttagaacttttaatttcggttacgtctgtgtgtgtctctgtgtgagaatgtgaacatgagtgcaggtgcctgtggggaccagaagaggagctagagtgacaggcagtttgggactgcctaaagtgaatctcaagagccaaactcaatagcaatcgtagtttccactcttaaacagtgagccatctttccagccccctaaatcctattctaataagaactaggtatcactaagatactggcttctctttccttatcctagacccttaatttatatatgtgcaagattctcaccatctgcccatattctgtgctacttgctttattttccaactctccactaaaagcattgattgtgcttttttggcaaatgtctgcaaagatgcattccccagtaaccatgctagtatttagctccttctaattcttcattttcctggacttggtctgaacctttctggtttcccacaaaccggtggccatgtgactgcaagacttgggaggtgaggatgtaagaaggctcactgaagcttaagctttgatctttcacaagtttcctgctcttcttaaatcacctgattcaattgtagtccaaggcagaacagtctttacaagaacctatgaacataagataaaaatatcttctcatctttccaaatggaattccaggactctggtttcccttactgcacaaagataaatttagtttgtcaacaactgtttcagtgatactttcatatttcccgcatcccgttatcattaccacaatcatcatcatcacaatcagcatcagcatcactaacacagattgtagtctcactgtatttcaggcacttgttaagtggtttgggaatacccaagaaccacacccttatatagttttcaaacaagtaatcaaattatatgaggcatattcaaaatactttccaaagaagaggctaacattttccttctttgtgaagactatgagagccaaacagacctacctcaaaaagttgttctgcagcagatttacttggtaagtaccaggggaagccatctgtcattgcactgctattggcttccatggctcagtgccacagaattctattaaagcaaccccagtgttagaaacaaatgagctgctcctttcaatattaaaaggaagtgacttcgtggaagatatcggctgataaaatacataagaaagtgttagatatgtgaacaaaataaaggtgggaatctttaaggaggaaaaatgcctggattttgcctttcacctccaaataaagaataatagatgctcttagcaaacagagagagggaaatgggggtggctgggcttccagactaacacatcaactatacgctgtaatttcacttttgcaacaccacactcttgactctgtggcaccaccagtaaaaattcattttcaggcagcacacctgaacaacctgtgctttgccttaattcactttccctgctaaaagccaacaggagaggtagcctcgcctaaggaggatggacggcagagcactccattggaggaggccacacgctaaattaatcatgttccaactagaatttgcaattctttgagagatgttcaagatggtataaaaaattcagaggtagcagggaaaggagaggggctgtgaagcagaaggcatcagagggcactttaaatgtgaagggcgcatcacactttcagcacgtgtacaaggcagcctgtcttacccagaatgtgataaatgaggactcttctcctagatacgccatttgatgggaactcccctcccagaccacacaaattgcagattcaatgctcatactgctttagttttatttctgtttctgtgattaaaacactgtgaccaaaaacaactctagagaaaggtttatttggcttacaattccaggtcacagtctatcattaagggaagtcaaggcgggaacttaaagtagaaacctgaaagcaagcctgcttgctattccatggagcattacttctgaccagagaaattattccacagacaaagaagtgtggcaggcattgtggaagatgctgtttgctgtcagccaggcagccttatgctcagctagttttcttacacacttcatgatcacagtctaaggaatggtaccactcacagtgggctgctcccttccacgtcaccaaccgagatgatcccctactggtatgcccaagtgccaatctaatctaggcaacccctcaacagaaagtctcaattttagattccattaagttgacagttaaagtccatgcgagagtttggagagcagaaacataaaggagaaaagatgtaactatcaattcaaaactgtaaaatgttatttttcaaaagttaaccaggacatacgaatatgaaattcatttatcatgaattatcattgatgtgtctatttgcaaggatagggtcagtctggtgataagctctccttaagagaacatagtctgactaagtaaaccagtcttaggagtattgcagtcttctagtttaaaactccttccctgaaaatgctgttacaaaaaccactttctttcccaacttctagaattttcacattgtaccattgccttcaccactgattttcttctatctgaaagcttccatttgtggtctcctcctgatgcatcatgagttgagatcttgggagggttttcacagcaaacagatcctctagaattattcctgtattttaaaggttgaaagtaaagcaatggggccaactatggagttcagcaggtattaaatgcacctgccaccaagtctaatgacctgagttcaacccatagggcagaaaaatagaactgactcccacaagttgtcttttgcctccacatggattccatgggatgtgtaagagcatgccaacatgcatgcacgcacatacacacggatataataagtgtaataatattttaataagctctctccttccacttgagaaagtgaggctccttgactgactcctgggaaatgtgacttctatatggaagcctctcctaacacaactccccttagaggcacatgagatctgcccctcaaactcacattttacctgtcttcaagcttccatttagttcctctactacgccacactcctcaaactttacacaggctgttggccgtcttcctggcatactgtccattccatgaataccttcccaaggcctaactggtctctagccttcagtcccaatggaaacattattgctcacaaagaacacatagtatctgtgccctgcacttaacccagtatttctacagttaccacagcaacacacatagcctgctctgtaacactgaccaccacttactcaaattgacgcccatagcagatggggaaagctactggggctgtgggtctaatttttttttttttgccaatgcaaacacatagcaggtatttatcacatggatgaataaagacaagaatggcatttgattcttctagctgctagtgtggtagctgaaatctaattagcattcagcgaaatactctggattaaatgcaggactaagaacccaagaatgtcagctgaattcagcagtaccctgagtcagctgggaaaagtcttcctaccctggttcctgcctgatctctcagtgggcttcttgctctcgccttggctcagatgaaagctagaaaaaaaaaaaggagagaaaaaaaacaaaaataataatatgcaatggaaagcaaactgccacattcaaaaacaatattcttctctgttccttacaattcctaccgttgaatgccacccctccccagaggaaaggatcactggaaaaacactcgtaaggaaaaaaatcaccacatttttttaaagtgtgctatttaaattctcactcatgaatatgtagctaatattgactaatgggaaccctaaaaggaagaaaactaaggctttttaaggcaaatccattgaaattaaggtcatctgtaagaaatttgtttaatttttttctgagccacatccaaaactccagcgggcacgttaaataatgaaagtataaactattgggatttggtgctggttagtatgttggcacagtacatagatccctatgtgatttaaaaaaaaaaaaaactaaaattttctctgcttcctttatctggaagcctccacaattaaaacagttttcttcatggagtaatacatgttaaccaaattatactctaatattttcattcaacgacttggaaagtcataaaaatgcttgtgtggggagttgccatgcagaaggagaaagaaagcaccatatcaggaggattttaaaaagagagagataaaacaaagagttccaaggattgtcacaatctgatctgcataaataaaagataatggcttcagtgcgctggccaacctttctgtggagtgatcggtctgtggagagtcatgtctgagaggctgcaggtcattatggcaggataaagcctatttctcatttatattaaagcaccttgcctgttaagggcttgatttgaatctcagacgtaaatgtgcatggggctacacaccttgttaagtcaatggctacatatgcatgctctccctaatacacagatagatttcagcatccacagccccaccattactccaactattcttttcttgacttagaaaagataatatttaggtagatcagaagtgctcaaatggacaggattagagcatacatttttctcttgacacagaattttttttctaattttgcatagaagaaacaaatttcttttcccttaaatgagatttgctacatcaacagaagaaggctaaactgtttccagttctgttttacatgtttgatttatctgattatctggtttcaggcaagatgaattgttccaagttagcatttggagactttgaaatgaaaatattgacatttaaaaaattcaataaacaaagcccaataacaacaaggaagtcaaggaaaactatagcccagtggactcaacctccttaatgctacaaccctttaatacagttcctcatgttgtggtaacccccagccataaaatattcttgctgctacttcataactataattttgctattatgaaacatattgtaaataactgttttttgttgagatctgatatatgacctcccaaagggtcatgacccacaggttgagaacccctgccgtagccccttgaattctttttttaaaaatgatttgtttttattttatgtgcattggtgttttgcttacttgtgtgcctgtgtgagggtgtcatatctcctgcgactggagttagagatagttatgaactgccatatgggtgctgggaaatgaacccaggtactctaggagaataaccagtactcttaacccctgaaccatctctccaactccacccattgaatttttaaaggagttgtgaattaaaactgaataacttctttggctaagaatctgagatggctgtagttttaatgaaagctctaccttcaatgcctttggatcaaaaggcacatatcacttcattcaggcatacttaagccctaatgagttgattggcatcagcaatccaaaaaattattcagacactgactttcagataaaagagcaacagattaatcttgactatagtaataatataacctgatagaagttttttgaacagaagataaagtctctcaatgtagcctcctcactaggctgatgatgccatttggcttcactggttcacagtttcttgcatttcctagtggatgaggtagtaggagttgatccaaacctatgaaaaggtagttctatagaaaaatggacaaagaaaggaataggagctaagacagggtggtgctgtggtcttcaaacaaaagtctagagaaatcaagaagagccagacttataaataatggggtgacttgtaccgaaaagtatcacaggatggttttagggggtctctggaatacagataaagggctcatgctgtggagtgctgtcaaatctgtgatgtgtgtgtatgaaagagaacacaaacatattccataagaaggggcctgtgtttcaatgaggatgctactgccccttgaaataggttttggaaattgggtcaatcatttattaacataatggttgggacattactggatcatcctagacaaggggcagggttctccctgtcttacagtggacaaggaagactaagtctaccccccacttgtcacatcatcacaatgatgaacacttgttcattcaccattatctagttttctcttataaatgcacatttagcatcacttgtctagttttaatattcatggacttctagagtagcagttataaacccaatcaagggcatgccatgtgtgtattcagatttttatcaagaggattcacaattttgaataaaaaagcatatctctcatgatatttgattaaacaatgcaatattacaacagtctttatggttggaggatttatagtgattccatatatgagtcagatgtcttttcagagaagattcctggcctctcctttataatgaagttaaggtgctattttaatatttatattccagtagtgcagaatgttatataaaagtagaactttggtcatctcattgtccagaacactgatctagggcaaaaatagtctgtatgacaaaggaagaaaatagaagctctcaacagacttaatgggaagaactgtcctttctgagtgtatctcaaagtgatgtaaattttaaggaaaggagaaaggcacacatgtatggttcctgagggcctgtgcgtacacagccattcccccactagatgttaagttaaggcaaaggcagggactgtagagtacatccctcacttggaaacctgggaagacactgctttgccttgtgtctcacgcagaacaccataataccagcagaatagacatggcagtgtggctcatacaggcagcaagtaaaaatggtggttctaagattgcttatgctacagacagatcacatgatagaagctagacatatataggtattcttggtagaggaactggatggcaccaggggtagcaagccagaaggttatctggagctttccctgttaaagttaaggtgcccctgagtcaggacctataggatggatagtcaaatgttgtgtttcatttgtttatgctgcatttgtttaactgtgtaaagatgtgttgctgtttcaccttgcctgtctaaagcacctgattactctaataaaaagttgaacagccaatagttagacagaggagggataggtgggcctggcaggcagagagaaaaagggagctggtcagccaggcaggcagacaaagaggaagcaggaaagtagggcatacagaatgaaagaaggtaaaaatccccaaggcaaaacatacagagaaacaggttaaattaagttataagagctaatgggacaagcaaaagataaggcagagcattcagaattaataataaatctccgtgtcataatttgggacctagcagtccaagaacgtctgctacagtcaaatgcggtaagatgtgacagggtctcgtgctatggctgagatgtacttacagccccagggcagcaatccctgaccgctctaagagaagggatcaccacagcagagccatggacactgaagcagtttgaatcaggggcatctccaaagtggccagcttacacacccaagaaactactgtggtgtcccaaggtctcttttcatacccagaagccatcctgcacaaagaacaagagcccagacatcaggagagcctgagccaggtccaggagtggcggaaagccaattagaagctgagtgactctggagaggtgtggatactttgcatgaccacgtttaagacttctcacaagggcaaaaactcttccctactcagctggataccaacaacaaaattaaaaaaaaaaaatcaacctttaaaaaaaaaaaacgactcagttcaccaagttttgtatttgtgtttagccttccatggatcagaaactggtcaagttgatcttgtactaaaggaactagaagggcatttcatttatcctgaacctaagactataaaataaaaacaagaataagaatgccatctactggtgtggaaagtagcaagcctctaataagtccgcagtgagcaaaagagaatgaaatgttcctgttattttacaatggagataaaagctagagaatggagtcttaaataactgaagtaataaagggcgtaggcaaataaacctccccagctggtagatctttcacggtatctaagttctgtggtgttccctaccgtgggttccgctctgacccagaagacaatgttaaagtggcataaagcatttcctttactgacttgttacaatgtttgaaaacaaactaatctcgaacttcatattttagttgttttgtccaggcagatagatggaaaggcatgtgactgtcctctgtttgttttcctggacattggcctaatgccgagctcttcgcacatttttgcagaagacacaccaggcatgagtgaactgtgtgttcagtgctcagtgctggcctctgggcacgtgttcatgtctatggacatcttcacgtggctggagatgcatttgtcaccatttcaaattgaaatattatgtctaatcacttgttatttcaaaatccttttcaaatcatgatatttcattagatatattcattaaaatgtccacatccccagggcttatttgattgagtataaatatctcattgttccagcaccatttacagaaaagataaaattatccttttcccaactaaacagctttggcacatttgccaaatactaattgatgaaatgtgtgggcagattcctgggttttatattctcttccataatttatttacctgttcttcactcttttgataatgatatctttatactaagtcttgaatcagccattgcaaatcgtctaaatagattcttttccaagaatttttaaaaatctatttttaggcattttgcagtcccatataaaccttaaaatcaccttgtaaatttgtgcaaaaatgagctgtgggaatcaattgagattgtgttgtgtttctaagttaattagtggcaaattcatcaataatgttgaggttttgtgtattaatagggtatgtctttacaattatgtgggtcctttaaatttttatgaagaaattatttgtaacataaaactcaaaatgaatccacagactaaatagaaagattaaaattataagcattctgaaatagaaaaagaaaaaaaaagacttcatgatcttgggtttggcgaaggtttcttcaatattataagaacataacacaaactatgagactaaataataagtaggacttcatcaaaatcacagaagagggggcagagagattttaagagccagaggcccaagacatctgctgctaggaagcttagtgactcctacccaccacagagaagccacacccaggaaatcccaaggttgcctaaagaagacttgtataatgacaacaccagtcgccatgccaacatggatggggagttttcataagcttctgtgcctagagaaaggactgcaggcgatcaatgacaactgcgaaagggccaatcagttttctcccaggacaatcccccagataggctatccaaccctaagtgatcagccctaaacacaagtatatataaacaacacagactcagtaggttttacatttaaatacacttcgtgtgtgtgtgtgtgtgtgtgtgtgtgtgtgtgtgtgtgtgacaataatagtttgaaaagaagaggtcatgaatttaagaactagtgggagagaacagagagataaacagggaggcagacataatgtaaatatagtgctcatacatggaattctcaaaacaaaaacaaatcaattaaatgaagacttatactcagaaaatgtaaatgaaatagaatcctatcatattattttgtgagcttgaaatgaattagcccagatgaaaaaaattaaaatgtaattcttcagaagacaccattagcaaaaaatgaaaggcaagtcccaaactgaaagaaaaattttgcaaaacataaactatctacaaaaaagaaacttatctggctggaaagatgatgcagcagttaagaataattcttgtacaggccatgccttccagaaaaccagatgggctaccaatagaacttctcctctctctgttcccctagacccaatccctcagtctcttcactagtcctgcaacagaccactagctgtaccctcctgcccccaattccctgtgggtcccacagactatcgcctcctaacccacctcccccaactgtctctgcatcccagtctccaacaccagcaggctttccctgtgaacacatcagctgagcaggtcaggaaaacaggcaggacatagccatctcacttacagaaaatccagaggaaacagaaatcaaggaacaaaacacctacccatcaaagacaaatcagcacctaggcctataatcatcccaaagccagatgcctagataccagtgtaaaaatacaacaaataaaagccagggcaatatatttctactagagcccagctatcctatcatagtggccctgaatatgtcaacagagctgaagaacaagaaaatgaccttaatgaagatgatagaggtccttaaaaattaaatgaacaaatctcttaaacaaatacaggaagacacaaacaattggaggaaatgaataaatcccttcaagaaagccaagaaaatacacagaaacatttgaagaaaactaataaaactgttcaagacctgaaaatggatatagaagcaataaaggaaacacaaactgagtgaagtctggagattaaaaaaaagttaagaattgagagagtgcggaggtgaggtgcttcaggttctgccttgggcccaacttctgcctgcccaccctggcaaatcccacccaagggtctgcaataggacgactcgacccctgaggaccaagcaacccaaagtctgctgacatctctgtgccagtgctgctctcacccacctggagagcgagtgcctcagacctgcctgctcctaacttgagacccatcagagtatcaaagtcaattgcacacacgtgaagagaatgccggacctatacacacctggaaaggaagtaacaccaactgtacccactggaacaagagatgggaagacaacaatataagaacacatccaacaacaggaaaaacaatatgacaccactagagtctagggactctacaccagcaagacataaacctcccaacacagaagcagcagaagagagcaaccttaaaaacaacttcatgcagatgatagagaacctaagagaggaaatcagaaaatccttcagagaaatggaagaaaagacaaacaaaagatgcaagaaatcaaggaaagcagaaaaaaaaacaagaaaatacaattaaacagctgaaggaaacagttcaggacctgaaaactgaattacagacaataaagaaaacacaaactgagggaatgctggacagacaataaagaaacaacaaactgaggaaaagctggaagtggaaaagctgagtaaacaatcaggaaccacagatgcaagcataaccaatagaatacaagagatggaagacagaatctcagatgctgaagacaaactagaggaaataaactcgtcaactaaaaatctgaagtctaacaaatccgtaacacaaaatatccaggaaatatgggacacaatgaaaagaccaaacctaagtataataggtataaaagaaggtgaagaaacccaactcaaaggtgcagaaaacatattcaacaaaatcatagaagaaaattttcccaacctaaagaaaggcatgccaatgagtgtacaagaagcctgcagaatgccaaatagagtggaccacaaaagaaagtctcctcatcacataataattaaaaaccaaacatacagaataaagaaaaaatattaagagcaacaaggggaaaagaccaagtnnnnnnnnnnnnnnnnnnnnnnnnnnnnnnnnnnnnnnnnnnnnnnnnnnnnnnnnnnnnnnnnnnnnnnnnnnnnnnnnnnnnnnnnnnnnnnnnnnnnnnnnnnnnnnnnnnnnnnnnnnnnnnnnnnnnnnnnnnnnnnnnnnnnnnnnnnnnnnnnnnnnnnnnnnnnnnnnnnnnnnnnnnnnnnnnnnnnnnnnnnnnnnnnnnnnnnnnnnnnnnnnnnnnnnnnnnnnnnnnnnnnnnnnnnnnnnnnaattaactacactcgcataaacataggcaatagataatcccatgctacaaaaacacaaaataaaaggcaggataaatcctcatacaataccaataccaacaacaaaccaaaaacaaacaagaataaacactcaatggaccttaatttccctcaatattaatgatcttaactctcctataaaaagacacaggttaacagattggatatgaagacagaatccatccttctgctgcatacaagaaacacacctcaaattcaaaggcagacattacctcagagtaaagggttgggataagatactccaatcaaatagacccaagaaatgagctggggtagctatccgagtatctaacaagttagacttcaaactaaaatcaatcaaacaagatgaagaaggccatttcagattcatcacaggaaaaatccatcaggaagaagtctcaattctaaannnnnnnnnnnnnnnnnnnnnnnnnnnnnnnngtaaaagaaacattattaaaactcaaatgacaaataagacctcacacagttatagtgggagacttcaatacccgactctcaacactggacaggaccaccagacagaaacttaacaaagagacaaaggaactaacagaagttatgacccaattgggattaacagacatttatagaactttctatccaaacacaaaagaatataccttcttttcagcatcacatgaaaccttctcaaaaatcgaatacattctcggcaacatagcaaatctcaacaggtacaaaaaaaattggaataatcccctgtgtcttatcagaccaccannnnnnnnnnnnnnnnnnnnnnnnnnnnnnnnnnnnnnnnnnnnnnnnnnnnnnnnnnnnnnnnnnnnnnnnnnnnnnnnnnnnnnnnnnnnnnnnnnnnnnnnnnnnnnnnnnnnnnnnnnnnnnnnnnnnnnnnnnnnnnnnnnnnnnnnnnnnnnnnnnnnnnnnnnnnnnnnnnnnnnnnnnnnnnnnnnnnnnnnnnnnnnnnnnnnnnnnnnnnnnnnnnnnnnnnnnnnnnnnnnnnnnnnnnnnnnnnnnnnnnnnnnnnnnnnnnnnnnnnnnnnnnnnnnnnnnnnnnnnnnnnnnnnnnnnnnnnnnnnnnnnnnnnnnnnnnnnnnnnnnnnnnnnnnnnnnnnnnnnnnnnnnnnnnnnnnnnnnnnnnnnnnnnnnnnnnnnnnnnnnnnnnnnnnnnnnnnnnnnnnnnnnnnnnncaaattaaccaaaaggcagagagagatcatgcaaattaaaaaaatcagaaatgaaaaggggaacctaacaacgacactgaggaaatccagagaatcctcaggtcattctttgaaaacctgtattccaaaaaatttgaaaatttaaaggaaatggacaattttctggacagttatcacttaccaaaattgaatcaagaacagataagcaacttaaacagacctataacctctaaggaaatagaagcagtcatcaaaagcctcccaaccaaaaaaagcccaggaccagatggattcattgcaaaattctaccagaaattcaaagaattgctaataccaatactcctcaaattgttccacaaaatagaagcagaagggacattgccaannnnnnnnnnnnnnnnnnnnnnnnnnnnnnnnnnnnnnnnnnnnnnnnnnnnnnnnnnnnnnnnnnnnnnnnnnnnnnnnnnnnnnnnnnnnnnnnnnnnnnnnnnnnnnnnnaaccatataaacagactgaggaaaaaccacatgatcatctcactagatgtggaaaaagcctttgacaaaatccaacaccccttcatgataaaggtcttggagaaatcagggataacaggaacatacctcaacataacnnnnnnnnnnaagctaacagccaacatcaaattaaatggagagaaactcgatccaattcctctaaaattggggacaagacaaggctgtccactctctccatacctcttcaatatagtccttgaagtcctagctagagcaataagacaacaaaaatgagatcaagggaatacaaatctgaaaggaagaagtcaaactctcactatttgcagatgatatgatagtctacattagtgacctgaaaaactctaccagggaactcctacagctgatannnnnnnnnnnnnnnnnnnnnnnnnnnnnnnnnnnnnnnnnnnnnnnnnnnnnnnnnnnnnnnnnnnnnnnnnnnnngatgacacattggtggagaaagaaatcagagaagcatcaccctttacaattgccacaaacaacataaaataccttggtaacactaaccaaaaaacgtaaaacacctgtaccataagaatttttagtctctaaagaaagaaattaaagaagataccagaaaatggaaagatctcccatgctcttggataggcaggatcaacatagtaaaaatggcaatcttgccaaaagcaatctacagattcaatgcaatccccatcaaaatcccaacacaattcttcacagaccttgaaagaacaattctcaactttatatggagaaacaaaagacccagggcagccaaaacatccccatacaataaaggaacttctggaggcatcatcatctctgacttcaagctctattacagagctatagtcctgaaaacagcttggtattggcacaaaaataaacatatagaccaatggaatagagtttaaaaccctgatattaacccacacacctatgaacacnnnnnnnnnnnnnnnnnnnnnnnnnnnnnnnnnnnnnnnnnnnnnnnnnnnnnnnnnnnnnnnactggatgctggaatgtagacgccttcagatagatccagatctatcaccatgcacaaaacttaagtccaaatgaatgaaagatctcaatataaatccagctacactgaacctattagaagacaaactgggaaatacccttgaattaatcggtacaggagaccgcttcctgaacattataccagtagcccagacactgaggtcaacaattgataaatgggaccctctgaaactgagaagcttctgtaaggcaaaggaggcagccagcaagacaaaacggcagctgacatactgggaaaagatattcaccaatcccacatctgacagagggctgatctccaaaatatacaaagaactcaagaagctattctcaaaaacaccaaacaatccaattaaaaaatggggtacannnnnnnnnnnnnnnnnnnnnnnnnnnnnnnnnnnnnnnnnnnnnnnnnnnnnnnnnnnnnnnnnnnnnnnnnnnnnnnnnnnnnnnnnnnnnnnnnnnnnnnnnnnnnnnnnnnnnnnnnnnnnnnnnnnnnnnnnnnnnnnnnnnnnnnnnnnnnnnnnnnnnnnnnnnnnnnnnnnnnnnnnnnnnnnnnnnnnnnnnnnnaatggagtactactcagcagaaaaaaaaacaatggaatcttgaaatttgcaggaaaatggatggatctagaagaaaccattctgagtgaggtaaaccaatcacaaaaagacaaacatggtatgtactcactcatatgtggattttagacatagagtaaggattaccagcctacaattcacactgccaaagaagctaataaacaaggaggcccctaagagagacatacatggtcccctaaagaaggggagagggtcaagatctgctgagcaaattgggagcacgggaagaggggggagctaggagcatgagaaagggagtagaagagggatgcagaggacatgagggagcagaaaatttgagtcaggggaagaatagatgataacaagaatggaggtatcataagagagaaagagagagattttaggtttacagagaaatcagccactaggaaaaggtctggagatctacaaggatgacaccagcaaacaatctaagcaacggagaagaggctaccttaaatgccctcccctgataatgagattgatgactgacttatttgccatcctatagccttcatcgagcagctggaggaagtagaaacagccacccacaactaatcaccgaactgaactggaacccagatgcagagaaggataagtgaagagcacaggggtccagaccaggctggtgaaacccacagaaacagctgccttgaacaagggggaactcttgctccccagactgatagctggaataccagcatgggactgatccagaccccaggaacatgggtttctgtgaattatttttcagaaatctacggcgcctcctatagaagtttactacttatccctagcataggtgtggactttgggagcccattctgtatagaggaatactccctgagccaagactcatggagttgggcctaggccctatcccaaaggatacaatagtctctgatgacatcctatggaaggcctcaccatccagggggagccgaaaggatatgtgataggtagggttttagttggtgatgctggtagggcaggactggcaagagaagggaagtgctgggattgttatgtaaaacaacactgtttctaattcaaattttaaaaagttggaaaaatatagagcacaaacacataggaaattccagaccatcatgttttaaagatatttttcaaaacactgaaattcctttgtctaaattattttttaactagggaagactttaaaggtcctagctttaaatatagagaatggatgtcttgtggaatggaacaaacttgaaaataaaatatttttctgacaataaaaaaaaattaagaagtcaaacaggagctatagagtcaagcttcaccaacagaatataaaagttggaagagagaatctcaggcattgaatatacaatgaaagaaatggatatatcagccaaaacatatgttaaatctaaatcaaaaaaaattctgatgtaaaacatctaggaaatctgagacactatgaaaagaccaaatctaagagtggcaggaatagagaaaggggaagagtcccagctcaaagacccagaaaatattttcaacaaaatcatagaagaaaaattcctaaactaaaggacatgcctataaaggtacaagatgcttatgaccaccaaaaagattgtaccagaatagaaagtccccttggtacataataatcaaaacactaaacatacagaagaaagaaagagaattataagatgcaagggaaaaatagcaactaacctacaaaagcagatctgttagaattacacctgatttctcaatggagactctaaaagccagaagggcctcaacagatgtgctgcagacgcctagagaacacagatgccagcccagactactgtactcagcaaaactttcaatcacaataggtggagaaaataagatattccatgataaagtctattctaaatatttgtcaataaatccagcccatagaaggtattagaatgaaaactccaactaaaggaggtcacctacacccatgaaaacagaaaaagtaatctcacatcagcaaaacataaagaagagatctctctctctctctctctctctctctctctctctctctctctctctcatgcacacacatacacacacacacaccaccaccaccacccacaacaacaacaacaacaacaacaaccacaaaatcataggaaacaacaatcattggtcattaataactctcagtatcaatggtctcacttccctgataaaaagacacagactaacagaatggatgtaaaaacaggatccctcttctgctgcatccaagaaacacacctcaatatcaagggtagacattacctcagggcaaaggattggaaatatatgaaacaaagggacccaagaagcaagctagtgtaacaattttaatgtctaatataatagactttaaaccaaaactaatcaaaagagctgggaaaggacactgcatattcatcaaaggaaaaatccatcaagaagacatttcaattcttaatatcttccccccaaacacaaagacactcgagtctgtagaagaaacatgactatagcttaaattacatacagatcttcttacactgatagtgggagacttcaatcctccactctcaccaatggagaggcatccagacaaaaacaaaacagagaaatgctggacttaacagatattatgaaccaaatggacctaccataactacagaacatttcagtcaaacacaaaataatatattcatactcatggaattttctccaaaactgaccacatactcagatacaaagcaagtctcaacaggtacaagaaaattgaaataactccctgaactctatcataccatcatagattaaagctggatatcaatggcaacagaaagcttacaaattcatgaaaactgaacaactctctactgaatgaaaaatgggtcaagacagaaataaaaaagaaactaaagacttcctagaattcaataaaaatgaatacacagcatatccaaacatttttaacactatataggcagttctaagaggaaagtttgtagtactaagtacctacatttaaaaataaaatggaaagatttcatactagaaacttaacagcacagctgaaagctccagaaaagtggttctcaaatttcctaatgctgttaacctttaatacagtttttcatgtcatggtgtctctcaaccataaaattattttcattgctacttcataactgcaatattgctactgttatgaatcctgacataaatatctgatatccaggatgtatgagtatccataacaatattgtgttttgatatgatggccctcaggaaggacccctacgaaagggtcatttgaccccctaaatgggtagcaacctaacaggttgagaaccacttctctagaacaaaatgaagtaaatacactcaagaggagtgtatagcaagaattaatcaaactgagaacagagatcaataaaatagaaacagagaacaatacaaagagtcaatgaaacagagctagttcttcaagaaaataaacaagatagaataacccttatccaaatcaactaaaagactgagagagaatattcaaattcacaaaatcagaaatgaaaagggtacacataacaacaaacaccaaggaaatccagagattcataaggacatactttaaaaacttttactccaccaaattggaaaatctgaaagaaaaggataattttcttgatacacaccacttatgaaagttaaatcaagatcagataaacaatataaatagacctataacacctagtgaaatagaacaagtcatcaaaagtctccccccacacacacctcaaaaaaaaatatctagggccagatggttttagttcagaattctaccaaactttcaaagaatagttaaagccaacatccctcaacatttttcacataatataaacataaagaatgcttatattcctcattttataagtccacagtagcctgatacctaaacaaactgaaagaaaaaaataaaaacatgatcatcttattagatgccaaaaaagcctttgacaaaatccaacaacccttcatgttaaaagtcttagagagattagggatacaagaaacacaacaaaggcaataagtaacaagcctatagccaacatcaaattaaatggagagatactcaaagcaaatccacaaaaatcaggagcaagacaaggctgttcactatctctatgtctattcaatatagtacttgaagttctaaatgaagcaataagacaactgaaggacattaagtggattaaaattagaaaggaagaagtcaaaccatcattatttgcagatgatatgatagtatatttaagtgattataaaatttccatcagggaactcctacagctgataaacactttcagtgaagtgctggatataagatttacaaaacaaaacaaaataaaacaaaaacagtagccctcttctatacaaatggcaaaccgactgagaaagaaatcagggaaacaacacctttcacaatagcctcaaataatataaaataccttggaatgactctgaccaagcaaataaaagacttgtatgataaaaaacatcaagtctttgaagaaagaaattgaagatatcagaagatggaaatatctcccatgtacatggatctgcaggattaacatagtaaaaatggcaatcttaccaaaagcaatctacagattcaagcaatccccatcatacttttaacacaattctttacagagcttgaaatgataattctcaacttcatatggaaaaacaagaaacccaagatagctaaaacaatccagaacaataaaagtacttttggatgttttaccatttctgatttcaagttgtactaaagaaatataataataaaaatcacatgctgttggcataaatacagatatgttgatcaatgaaatagaagtgaagacccagacataaattcataaccattaggacacctgtcttttgataaagaagccagaaatacacactggaaaaaaagaaagtatcttcaacaaatggtgctgggcaaacgtctacatggagaagagcacaaatagatccatatttattgccctccacaaaactcacatccaagtgcatcaaaaacctcaacataaaatctgagacattggacctaatagatgagaaagttgggaatattctttaactctttggcataggaaaagaacttctgaacagaacactgttaacacttagacactaagatcaacaattataaaacagaaccttgtgaaactgaaaagcttctgtacaaaggacaccatcaatcagataaagtgtaagtgcacagcatggaaaaatattgtttccaactccacatctaatagagggctaatatccaaaatatgtagaaaacttgagaaactatataccaaaaaagaatctaattttaaaatggggtatagatttgaacagaggattctgaatagaggaatctcaaatcgctgagaaacacttaaaatgtccaacatttcctgatgttagccatcaggaaaatgcaaatcataatgactctgagatgccatcttacacctgtcagaatggctaagatcagaaacacaagctacagctcatgctggagaggatgtggagtaaggggaacactcatccattgctggtaggaatgtaagccactatgggaatcaatatggtggctcctcagaaaattgaaaatacatctacctcaagaccctgctataccacacttaaagcatacacccaaagtcactccatcctaccacaaggatacttgctaaaccatgttcttttggctttattcataatagccagaatgaggaaataaccaagatattccttaaaagaagaatagataaacaaaatacgatgcatttacacaatggaacattacttaaatgcttaaaaaacataacatcatgagatttgcatgcaaatgagtgaactagaataaaatcatcctgagtagggtaagcctgacccacaaaggcaaatatgttatgtattcacttataagaggatattggatattaagtaaatgacaaccaagccacaatttgtaaacacagagatgttaggtaaagagtttagttgggtctccctgggaaggggaaatagaataagttttattggtagactgggggcaggtgtggacaggagcaggagggggtaggtgggaaggagatggttggagggagagagtgctggaaaagatggctgaaattggaagggttgtggaaacctggtacagtggaaacttcctgggatcttcgaacattgatcctaatgaggactcctagtaatggtggcgagagtctcaactgtctatctctcatatccaggcaatgtgtccagtagaggaactgtgttgcattcaactgagttgttggccaagggggtcccatgaaaatccccaaacaacataagctgatgctaagacaaaagagttgctcttcccaaactgacagtggggtcccactgccaaggataacatccacacaatgcactgaacatggaaaagttgagctgatgtccatagaaccctcaccttacattctagtctctttggtgtgggaagatactctgcaggctactgaaagagaaatgtggacaccaatccagccacaaaatctttgacctacaatatttcttacctataaaatatgctggggcaatggtgacacataacttgtgagagtagccaaccaatgtctgatttgacttaaggcacattccacttaagaaggaacccatatgggacgctgcttgagtaaccaagaaccggagactagacagcccagagacttagagtaaagcccaacatgactaacctaaaaaaacaataaaatgattcataatgatattctgctatagtcatagatcagtaccttacccaatcatcatcaaagaagattcctccagcagcagatggatgcagatacagaaagccagagtcagacattctgtggaaagagagtctaaactagaggtctccattgggttcctcccctcggagcttagggaatcctatgaaagaggaggcagaaagactttaagagtcagaggagacggaaaaatcaagagaacatgacactctgaaccaagtaagcaaggcacacatgagctcacaaagccggaagcagcaagcacagcactgacgtggctccacagcagctgctctgcatatatataatagccgctgttagcttagtatttttacatggctgctgattatgagaacaagtgggtctctggctctcgcgcctgctcctgggctctttgcttcctgtggggtttccatgccacactccaatgccagagctttcacttcatcttagtagattttttgtcgtttggttgttttctcttagaagcccgttcttttctaatgagagattgagagatggaaagggaggaaggtgatgaggaactgggtggatggagggagggggagctagaatcaggatatattatatgagaaaagaactatcttcagcaaaaaagaaaataaatcatataaattctctgataaagaaaataccacttgttcttatagggaacccaggttcaattcccagcacgcacatggaaattcacaactccatttccagggtatccactaccctcttctggaatctatgggtatcaa
